(19) United States
(12) Patent Application Publication
(10) Pub. No.: US 2010/0293665 A1
(43) Pub. Date: Nov. 18, 2010

(54) Plants With Increased Yield (KO NUE)

(75) Inventors: Piotr Puzio, Mariakerke (Gent) (BE); Oliver Bläsing, Potsdam (DE); Oliver Thimm, Berlin (DE)

Correspondence Address: CONNOLLY BOVE LODGE & HUTZ, LLP, P O BOX 2207, WILMINGTON, DE, 19899, US

(73) Assignee: BASF Plant Science GmbH, Ludwigshafen (DE)

(21) Appl. No.: 12/809,631

(22) PCT Filed: Dec. 19, 2008
(86) PCT No.: PCT/EP2008/067998

§ 371 Date: Jun. 21, 2010

(30) Foreign Application Priority Data
Dec. 21, 2007 (EP) 07150295.9

(51) Int. Cl. A01N 63/00; A01H 1/00; C07H 21/04; C07H 21/02; C07K 14/415; C12N 15/63; C12N 5/10; A01H 5/00; C07K 16/16; C12P 21/02; C12Q 1/02; C12Q 1/68; A01P 21/00

(52) U.S. Cl. 800/278; 536/23.6; 536/24.5; 536/23.2; 536/24.33; 530/324; 530/350; 435/320.1; 435/419; 800/298; 800/320.1; 800/320.3; 800/320; 800/320.2; 800/314; 800/306; 800/317.1; 800/322; 800/317.2; 800/317.3; 800/317; 800/317.4; 435/411; 435/412; 435/414; 435/416; 435/417; 530/387.9; 435/69.1; 435/29; 504/117; 435/410; 435/6

(57) ABSTRACT

This invention relates generally to transformed plant cells and plants or parts thereof comprising an inactivated or down-regulated gene resulting an increased yield, in particular an increased yield-related trait, e.g. an increased nutrient use efficiency, such as an enhanced nitrogen use efficiency and/or increased biomass production as compared to, e.g. non-transformed, wild type cells and methods of producing such plant cells or plants or parts thereof.

[0001] This invention relates generally to transformed plant cells and plants or parts thereof comprising an inactivated or down-regulated gene resulting an increased yield, in particular an increased yield-related trait, e.g. an increased nutrient use efficiency, such as an enhanced nitrogen use efficiency and/or increased biomass production as compared to, e.g. non-transformed, wild type cells and methods of producing such plant cells or plants or parts thereof.

[0002] In particular, this invention relates to plants tailored to grow under conditions of nitrogen deficiency; and/or to plant cells and/or parts of plants, showing increased yield when grown under non-nitrogen-deficiency conditions.

[0003] The invention also deals with methods of producing and screening for and breeding such plant cells, plants or parts thereof, especially plants.

[0004] Agricultural biotechnologists also use measurements of other parameters that indicate the potential impact of a transgene on crop yield. For forage crops like alfalfa, silage corn, and hay, the plant biomass correlates with the total yield. For grain crops, however, other parameters have been used to estimate yield, such as plant size, as measured by total plant dry weight, above-ground dry weight, above-ground fresh weight, leaf area, stem volume, plant height, rosette diameter, leaf length, root length, root mass, tiller number, and leaf number. Plant size at an early developmental stage will typically correlate with plant size later in development. A larger plant with a greater leaf area can typically absorb more light and carbon dioxide than a smaller plant and therefore will likely gain a greater weight during the same period. There is a strong genetic component to plant size and growth rate, and so for a range of diverse genotypes plant size under one environmental condition is likely to correlate with size under another. In this way a standard environment is used to approximate the diverse and dynamic environments encountered at different locations and times by crops in the field. Some genes that are involved in stress responses, water use, and/or biomass in plants have been characterized, but to date, success at developing transgenic crop plants with improved yield has been limited, and no such plants have been commercialized. There is a need, therefore, to identify additional genes that have the capacity to increase yield of crop plants.

[0005] Plant nutrition is essential to the growth and development of plants and therefore also for quantity and quality of plant products. Because of the strong influence of the efficiency of nutrition uptake as well as nutrition utilization on plant yield and product quality, a huge amount of fertilizer is poured onto soils to optimize plant growth and quality.

[0006] Plant growth is primarily limited by three nutrients—phosphorous, potassium and nitrogen. Therefore nitrogen (N) is one of the major nutritional elements required for plant growth, which is usually the rate-limiting element in plant growth. Nitrogen is part of numerous important compounds found in living cells, like amino acids, proteins (e.g. enzymes), nucleic acids, and chlorophyll. 1.5% to 2% of plant dry matter is nitrogen and approximately 16% of total plant protein. Thus, the availability of nitrogen has a major impact on amino acid synthesis as well as amino acid composition, accumulation of amino acids, on protein synthesis and accumulation thereof, and based thereupon it is a major limiting factor for plant growth and yield (Frink C. R., Proc. Natl. Acad. Sci. USA 96, 1175 (1999)).

[0007] Because of the high nitrogen requirements for crop plants, nitrogen fertilization is a major worldwide agricultural investment, with 80 million metric tons of nitrogen fertilizers (as nitrate and/or ammonium) applied annually (Frink C. R., Proc. Natl. Acad. Sci. USA 96, 1175 (1999)). There are also negative environmental consequences for the extensive use of nitrogen containing fertilizers in crop production since the crops retain only about two-thirds of the applied nitrogen. Therefore high inputs of fertilizer are followed by large outputs by leaching, gaseous losses and crop removal. The unabsorbed nitrogen can subsequently leach into the soil and contaminate water supplies (Frink C. R., Proc. Natl. Acad. Sci. USA 96, 1175 (1999)). Because of the high leaching losses of nitrogen from agricultural ecosystems to surface water and groundwater, nitrogen is also recognized as an pollutant. Nitrogen leaching, namely as nitrate from agricultural lands, affects drinking water quality and causes eutrophication of lakes and coastal areas. Abundant use of nitrogen containing fertilizers can further lead to final deterioration of soil quality, to environmental pollution and health hazards.

[0008] Because of the high costs of nitrogen fertilizer in relation to the revenues for agricultural products, and additionally its deleterious effect on the environment, it is desirable to develop strategies to reduce nitrogen input and/or to optimize nitrogen uptake and/or utilization of a given nitrogen availability while simultaneously maintaining optimal yield, productivity and quality of photosynthetic active organisms, preferably cultivated plants, e.g. crops. Also it is desirable to obtain “existing” yield of crops with lower fertilizer input and/or higher yield on soils of similar or even poorer quality.

[0009] Ammonium uptake systems have been characterized in different organisms, including yeast and plants. The yeast Saccharomyces cerevisiae contains three MEP genes for ammonium transporters, which are all controlled by nitrogen, being repressed in the presence of an nitrogen source that is readily metabolised, such as NH₄₊(Marini et al., Mol. Cell. Biol. 17, 4282 (1997)). Plant genes encoding ammonium transport systems have been cloned by complementation of a yeast mutant, homology searches in databases and heterologous hybridizations (von Wiren N. et al., Curr. Opin. Plant Biol., 3, 254 (2000)). Experimental evidence of the physiological function of NH₄⁺ transporters mainly rely on correlations between ammonium transporter expression and influx of labeled ammonium. The situation is complicated by the fact, that in Arabidopsis but also in other plants ammonium transporters are present in gene families, the members of which have different expression patterns and physiological characteristics. Although DE 43 37 597 claims sequences for plant ammonium transporters and their use for manipulation of the nitrogen metabolism and plant growth under certain conditions, any evidence for positive effects on nitrogen assimilation or plant growth under certain conditions through ectopic expression of the plant ammonium transporters are missing. Therefore literature evidence for the engineering of nitrogen assimilation in plants is still limited to a few cases, not including transporters.

[0010] However, there is still a need for photosynthetic active organisms, especially plants, with increased yield, in particular an increased yield-related trait, e.g. an increased nutrient use efficiency, such as plants that are capable to use nitrogen more efficiently so that less nitrogen is required for the same yield or higher yields may be obtained with current levels of nitrogen use. In addition, there is still a need for photosynthetic active organism, especially plants, that show an increase in biomass .

[0011] Accordingly, it is a object of this invention to develop an inexpensive process for the production of photosynthetic active organisms, especially plants, with increased yield, in particular an increased yield-related trait, e.g. an increased nutrient use efficiency, such as plants that are capable to use nitrogen more efficiently so that less nitrogen is required for the same yield or higher yields may be obtained with current levels of nitrogen use. For example, there in the process of the invention an enhanced nitrogen up-take and/or transport and/or assimilation and/or utilisation in a photosynthetic active organism, which are reflected alone or altogether in an increased nitrogen use efficiency (NUE) and/or a process for an increased biomass production and/or yield, for example under conditions of limited nitrogen supply.

[0012] It was found that this object is achieved by providing a process according to the present invention described herein.

[0013] It is further an object of this invention to provide plant cells and/or plants, which show increased yield, in particular an increased yield-related trait, e.g. an increased nutrient use efficiency, such as an enhanced NUE, and/or exhibit under conditions of limited nitrogen supply an increase in biomass production and/or yield, as compared to a corresponding, e.g. non-transformed, wild type plant cell and/or plant.

[0014] It was found that this object is achieved by providing plant cells and/or plants according to the present invention described herein.

[0015] Accordingly, in one embodiment, the present invention provides a method for producing a plant with increased yield as compared to a corresponding wild type plant comprising at least the following step: Reducing, repressing or deleting of one or more activities selected from the group consisting of At1g74730-protein, At3g63270-protein, protein kinase, protein serine/threonine phosphatase, and SET domain-containing protein (in the following referred to as “activity”, e.g. as “said activity”) in the subcellular compartment and tissue indicated herein.

[0016] Accordingly, in a further embodiment, the invention provides reducing, repressing or deleting in a transgenic plant an isolated polynucleotide as identified in Table I in the subcellular compartment and tissue indicated herein. The transgenic plant of the invention demonstrates an improved yield or increased yield as compared to a wild type variety of the plant. The terms “improved” or “increased” or “enhanced” can be used interchangeable.

[0017] The term “yield” as used herein generally refers to a measurable produce from a plant, particularly a crop. Yield and yield increase (in comparison to a non-transformed starting or wild-type plant) can be measured in a number of ways, and it is understood that a skilled person will be able to apply the correct meaning in view of the particular embodiments, the particular crop concerned and the specific purpose or application concerned.

[0018] For the purposes of the description of the present invention, enhanced or increased “yield” refers to one or more yield parameters selected from the group consisting of biomass yield, dry biomass yield, aerial dry biomass yield, underground dry biomass yield, fresh-weight biomass yield, aerial fresh-weight biomass yield, underground fresh-weight biomass yield; enhanced yield of harvestable parts, either dry or fresh-weight or both, either aerial or underground or both; enhanced yield of crop fruit, either dry or fresh-weight or both, either aerial or underground or both; and preferably enhanced yield of seeds, either dry or fresh-weight or both, either aerial or underground or both.

[0019] As used herein, the term “improved yield” or the term “increased yield” means any improvement in the yield of any measured plant product, such as grain, fruit or fiber. In accordance with the invention, changes in different phenotypic traits may improve yield. For example, and without limitation, parameters such as floral organ development, root initiation, root biomass, seed number, seed weight, harvest index, tolerance to abiotic environmental stress, leaf formation, phototropism, apical dominance, and fruit development, are suitable measurements of improved yield. Any increase in yield is an improved yield in accordance with the invention. For example, the improvement in yield can comprise a 0.1%, 0.5%, 1%, 3%, 5%, 10%, 15%, 20%, 30%, 40%, 50%, 60%, 70%, 80%, 90% or greater increase in any measured parameter. For example, an increase in the bu/acre yield of soybeans or corn derived from a crop comprising plants which are transgenic for the nucleotides and polypeptides of Table I, as compared with the bu/acre yield from untreated soybeans or corn cultivated under the same conditions, is an improved yield in accordance with the invention. The increased or improved yield can be achieved in the absence or presence of stress conditions.

[0020] For example, the present invention provides methods for producing transgenic plant cells or plants with can show an increased yield-related trait, e.g. an increased tolerance to environmental stress and/or increased intrinsic yield and/or biomass production as compared to a corresponding (e.g. non-transformed) wild type or starting plant by increasing or generating one or more of said activities mentioned above.

[0021] In one embodiment, an increase in yield refers to increased or improved crop yield or harvestable yield.

[0022] Crop yield is defined herein as the number of bushels of relevant agricultural product (such as grain, forage, or seed) harvested per acre. Crop yield is impacted by abiotic stresses, such as drought, heat, salinity, and cold stress, and by the size (biomass) of the plant. Traditional plant breeding strategies are relatively slow and have in general not been successful in conferring increased tolerance to abiotic stresses. Grain yield improvements by conventional breeding have nearly reached a plateau in maize.

[0023] Accordingly, the yield of a plant can depend on the specific plant/crop of interest as well as its intended application (such as food production, feed production, processed food production, bio-fuel, biogas or alcohol production, or the like) of interest in each particular case. Thus, in one embodiment, yield is calculated as harvest index (expressed as a ratio of the weight of the respective harvestable parts divided by the total biomass), harvestable parts weight per area (acre, square meter, or the like); and the like. The harvest index, i.e., the ratio of yield biomass to the total cumulative biomass at harvest, in maize has remained essentially unchanged during selective breeding for grain yield over the last hundred years. Accordingly, recent yield improvements that have occurred in maize are the result of the increased total biomass production per unit land area. This increased total biomass has been achieved by increasing planting density, which has led to adaptive phenotypic alterations, such as a reduction in leaf angle, which may reduce shading of lower leaves, and tassel size, which may increase harvest index. Harvest index is relatively stable under many environmental conditions, and so a robust correlation between plant size and grain yield is possible. Plant size and grain yield are intrinsically linked, because the majority of grain biomass is dependent on current or stored photosynthetic productivity by the leaves and stem of the plant. As with abiotic stress tolerance, measurements of plant size in early development, under standardized conditions in a growth chamber or greenhouse, are standard practices to measure potential yield advantages conferred by the presence of a transgene.

[0024] For example, the yield refers to biomass yield, e.g. to dry weight biomass yield and/or fresh-weight biomass yield. Biomass yield refers to the aerial or underground parts of a plant, depending on the specific circumstances (test conditions, specific crop of interest, application of interest, and the like). In one embodiment, biomass yield refers to the aerial and underground parts. Biomass yield may be calculated as fresh-weight, dry weight or a moisture adjusted basis. Biomass yield may be calculated on a per plant basis or in relation to a specific area (e.g. biomass yield per acre/square meter/or the like).

[0025] In other embodiment, “yield” refers to seed yield which can be measured by one or more of the following parameters: number of seeds or number of filled seeds (per plant or per area (acre/square meter/or the like)); seed filling rate (ratio between number of filled seeds and total number of seeds); number of flowers per plant; seed biomass or total seeds weight (per plant or per area (acre/square meter/or the like); thousand kernel weight (TKW; extrapolated from the number of filled seeds counted and their total weight; an increase in TKW may be caused by an increased seed size, an increased seed weight, an increased embryo size, and/or an increased endosperm). Other parameters allowing to measure seed yield are also known in the art. Seed yield may be determined on a dry weight or on a fresh weight basis, or typically on a moisture adjusted basis, e.g. at 15.5 percent moisture.

[0026] In one embodiment, the term “increased yield” means that the photosynthetic active organism, especially a plant, exhibits an increased growth rate, under conditions of abiotic environmental stress, compared to the corresponding wild-type photosynthetic active organism. An increased growth rate may be reflected inter alia by or confers an increased biomass production of the whole plant, or an increased biomass production of the aerial parts of a plant, or by an increased biomass production of the underground parts of a plant, or by an increased biomass production of parts of a plant, like stems, leaves, blossoms, fruits, and/or seeds.

[0027] In an embodiment thereof, increased yield includes higher fruit yields, higher seed yields, higher fresh matter production, and/or higher dry matter production.

[0028] In another embodiment thereof, the term “increased yield” means that the photosynthetic active organism, preferably plant, exhibits an prolonged growth under conditions of abiotic environmental stress, as compared to the corresponding, e.g. non-transformed, wild type photosynthetic active organism. A prolonged growth comprises survival and/or continued growth of the photosynthetic active organism, preferably plant, at the moment when the non-transformed wild type photosynthetic active organism shows visual symptoms of deficiency and/or death.

[0029] For example, in one embodiment, the plant used in the method of the invention is a corn plant. Increased yield for corn plants means in one embodiment, increased seed yield, in particular for corn varieties used for feed or food. Increased seed yield of corn refers in one embodiment to an increased kernel size or weight, an increased kernel per pod, or increased pods per plant. Further, in one embodiment, the cob yield is increased, this is particularly useful for corn plant varieties used for feeding. Further, for example, the length or size of the cob is increased. In one embodiment, increased yield for a corn plant relates to an improved cob to kernel ratio.

[0030] For example, in one embodiment, the plant used in the method of the invention is a soy plant. Increased yield for soy plants means in one embodiment, increased seed yield, in particular for soy varieties used for feed or food. Increased seed yield of soy refers in one embodiment to an increased kernel size or weight, an increased kernel per pod, or increased pods per plant.

[0031] For example, in one embodiment, the plant used in the method of the invention is an oil seed rape (OSR) plant. Increased yield for OSR plants means in one embodiment, increased seed yield, in particular for OSR varieties used for feed or food. Increased seed yield of OSR refers in one embodiment to an increased kernel size or weight, an increased kernel per pod, or increased pods per plant.

[0032] For example, in one embodiment, the plant used in the method of the invention is a cotton plant. Increased yield for cotton plants means in one embodiment, increased lint yield. Increased cotton yield of cotton refers in one embodiment to an increased length of lint. Increased seed yield of corn refers in one embodiment to an increased kernel size or weight, an increased kernel per pod, or increased pods per plant.

[0033] Said increased yield in accordance with the present invention can typically be achieved by enhancing or improving, in comparison to an origin or wild-type plant, one or more yield-related traits of the plant. Such yield-related traits of a plant the improvement of which results in increased yield comprise, without limitation, the increase of the intrinsic yield capacity of a plant, improved nutrient use efficiency, and/or increased stress tolerance, in particular increased abiotic stress tolerance.

[0034] Accordingly to present invention, yield is increased by improving one or more of the yield-related traits as defined herein:

[0035] Intrinsic yield capacity of a plant can be, for example, manifested by improving the specific (intrinsic) seed yield (e.g. in terms of increased seed/grain size, increased ear number, increased seed number per ear, improvement of seed filling, improvement of seed composition, embryo and/or endosperm improvements, or the like); modification and improvement of inherent growth and development mechanisms of a plant (such as plant height, plant growth rate, pod number, pod position on the plant, number of internodes, incidence of pod shatter, efficiency of nodulation and nitrogen fixation, efficiency of carbon assimilation, improvement of seedling vigour/early vigour, enhanced efficiency of germination (under stressed or non-stressed conditions), improvement in plant architecture, cell cycle modifications, photosynthesis modifications, various signaling pathway modifications, modification of transcriptional regulation, modification of translational regulation, modification of enzyme activities, and the like); and/or the like.

[0036] The improvement or increase of stress tolerance of a plant can for example be manifested by improving or increasing a plant's tolerance against stress, particularly abiotic stress. In the present application, abiotic stress refers generally to abiotic environmental conditions a plant is typically confronted with, including conditions which are typically referred to as “abiotic stress” conditions including, but not limited to, drought (tolerance to drought may be achieved as a result of improved water use efficiency), heat, low temperatures and cold conditions (such as freezing and chilling conditions), salinity, osmotic stress , shade, high plant density, mechanical stress, oxidative stress, and the like.

[0037] The increased plant yield can also be mediated by increasing the “nutrient use efficiency of a plant”, e.g. by improving the use efficiency of nutrients including, but not limited to, phosphorus, potassium, and nitrogen. For example, there is a need for plants that are capable to use nitrogen more efficiently so that less nitrogen is required for growth and therefore resulting in the improved level of yield under nitrogen deficiency conditions. Further, higher yields may be obtained with current or standard levels of nitrogen use.

[0038] In one embodiment of the present invention, these traits are achieved by a process for the enhanced nitrogen utilization (=nitrogen use efficiency (NUE) in a plant as compared to a corresponding, e.g. non-transformed, wild type plant.

[0039] In an embodiment thereof, the term “enhanced NUE” means that the plant exhibits an enhanced biomass yield per unit of nitrogen available from the surrounding medium, soil or environment, including nitrogen fertilizer, on which the plant is grown, as compared to a corresponding, e.g. non-transformed, wild type plant.

[0040] In an embodiment thereof, the term “enhanced NUE” means that the plant exhibits an enhanced dry biomass yield per unit of nitrogen available from the surrounding medium, soil or environment, including nitrogen fertilizer, on which the plant is grown, as compared to a corresponding, e.g. non-transformed, wild type plant.

[0041] In an embodiment thereof, the term “enhanced NUE” means that the plant exhibits an enhanced aerial dry biomass yield per unit of nitrogen available from the surrounding medium, soil or environment, including nitrogen fertilizer, on which the plant is grown, as compared to a corresponding, e.g. non-transformed, wild type photosynthetic plant.

[0042] In an embodiment thereof, the term “enhanced NUE” means that the plant exhibits an enhanced underground dry biomass yield per unit of nitrogen available from the surrounding medium, soil or environment, including nitrogen fertilizer, on which the plant is grown, as compared to a corresponding, e.g. non-transformed, wild type plant.

[0043] In another embodiment thereof, the term “enhanced NUE” means that the plant exhibits an enhanced fresh weight biomass yield per unit of nitrogen available from the surrounding medium, soil or environment, including nitrogen fertilizer, on which the plant is grown, as compared to a corresponding, e.g. non-transformed, wild type plant.

[0044] In an embodiment thereof, the term “enhanced NUE” means that the plant exhibits an enhanced aerial fresh weight biomass yield per unit of nitrogen available from the surrounding medium, soil or environment, including nitrogen fertilizer, on which the plant is grown, as compared to a corresponding, e.g. non-transformed, wild type plant.

[0045] In an embodiment thereof, the term “enhanced NUE” means that the plant exhibits an enhanced underground fresh weight biomass yield per unit of nitrogen available from the surrounding medium, soil or environment, including nitrogen fertilizer, on which the plant is grown, as compared to a corresponding, e.g. non-transformed, wild type plant.

[0046] In another embodiment thereof, the term “enhanced NUE” means that the plant exhibits an enhanced yield of harvestable parts of a plant per unit of nitrogen available from the surrounding medium, soil or environment, including nitrogen fertilizer, on which the plant is grown, as compared to a corresponding, e.g. non-transformed, wild type plant.

[0047] In an embodiment thereof, the term “enhanced NUE” means that the plant exhibits an enhanced yield of dry harvestable parts of a plant per unit of nitrogen available from the surrounding medium, soil or environment, including nitrogen fertilizer, on which the plant is grown, as compared to a corresponding, e.g. non-transformed, wild type plant.

[0048] In an embodiment thereof, the term “enhanced NUE” means that the plant exhibits an enhanced yield of dry aerial harvestable parts of a plant per unit of nitrogen available from the surrounding medium, soil or environment, including nitrogen fertilizer, on which the plant is grown, as compared to a corresponding, e.g. non-transformed, wild type plant.

[0049] In an embodiment thereof, the term “enhanced NUE” means that the plant exhibits an enhanced yield of underground dry harvestable parts of a plant per unit of nitrogen available from the surrounding medium, soil or environment, including nitrogen fertilizer, on which the plant is grown, as compared to a corresponding, e.g. non-transformed, wild type plant.

[0050] In another embodiment thereof, the term “enhanced NUE” means that the plant exhibits an enhanced yield of fresh weight harvestable parts of a plant per unit of nitrogen available from the surrounding medium, soil or environment, including nitrogen fertilizer, on which the plant, is grown, as compared to a corresponding, e.g. non-transformed, wild type plant.

[0051] In an embodiment thereof, the term “enhanced NUE” means that the plant exhibits an enhanced yield of aerial fresh weight harvestable parts of a plant per unit of nitrogen available from the surrounding medium, soil or environment, including nitrogen fertilizer, on which the plant is grown, as compared to a corresponding, e.g. non-transformed, wild type plant.

[0052] In an embodiment thereof, the term “enhanced NUE” means that the plant exhibits an enhanced yield of underground fresh weight harvestable parts of a plant per unit of nitrogen available from the surrounding medium, soil or environment, including nitrogen fertilizer, on which the plant is grown, as compared to a corresponding, e.g. non-transformed, wild type plant.

[0053] In a further embodiment, the term “enhanced NUE” means that the plant exhibits an enhanced yield of the crop fruit per unit of nitrogen available from the surrounding medium, soil or environment, including nitrogen fertilizer, on which the plant is grown, as compared to a corresponding, e.g. non-transformed, wild type plant.

[0054] In an embodiment thereof, the term “enhanced NUE” means that the plant exhibits an enhanced yield of the fresh crop fruit per unit of nitrogen available from the surrounding medium, soil or environment, including nitrogen fertilizer, on which the plant is grown, as compared to a corresponding, e.g. non-transformed, wild type plant.

[0055] In an embodiment thereof, the term “enhanced NUE” means that the plant exhibits an enhanced yield of the dry crop fruit per unit of nitrogen available from the surrounding medium, soil or environment, including nitrogen fertilizer, on which the plant is grown, as compared to a corresponding, e.g. non-transformed, wild type plant.

[0056] In an embodiment thereof, the term “enhanced NUE” means that plant exhibits an enhanced grain dry weight per unit of nitrogen supplied, as compared to a corresponding, e.g. non-transformed, wild type plant, in analogy to Reynolds, M. P., Ortiz-Monasterio J. J., and McNab A. (eds.), 2001, “Application of Physiology in Wheat Breeding, Mexico, D.F.:CIMMYT, which is incorporated by reference.

[0057] In a further embodiment, the term “enhanced NUE” means that the plant exhibits an enhanced yield of seeds per unit of nitrogen available from the surrounding medium, soil or environment, including nitrogen fertilizer, on which the plant, is grown, as compared to a corresponding, e.g. non-transformed, wild type plant.

[0058] In an embodiment thereof, the term “enhanced NUE” means that the plant exhibits an enhanced yield of fresh weight seeds per unit of nitrogen available from the surrounding medium, soil or environment, including nitrogen fertilizer, on which the plant is grown, as compared to a corresponding, e.g. non-transformed, wild type plant.

[0059] In an embodiment thereof, the term “enhanced NUE” means that the plant exhibits an enhanced yield of dry seeds per unit of nitrogen available from the surrounding medium, soil or environment, including nitrogen fertilizer, on which the plant is grown, as compared to a corresponding, e.g. non-transformed, wild type plant.

[0060] In another embodiment of the present invention, these traits are achieved by a process for an increase in biomass production and/or yield under conditions of limited nitrogen supply, in an plant, as compared to a corresponding, e.g. non-transformed, wild type plant.

[0061] In an embodiment thereof, the term “increased biomass production” means that the plant exhibit an increased growth rate under conditions of limited nitrogen supply, compared to the corresponding wild-type plant. An increased growth rate may be reflected inter alia by an increased biomass production of the whole plant, or by an increased biomass production of the aerial parts of a plant, or by an increased biomass production of the underground parts of a plant, or by an increased biomass production of parts of a plant, like stems, leaves, blossoms, fruits, seeds.

[0062] In an embodiment thereof, increased biomass production includes higher fruit yields, higher seed yields, higher fresh matter production, and/or higher dry matter production.

[0063] In another embodiment thereof, the term “increased biomass production” means that the plant, exhibits an prolonged growth under conditions of limited nitrogen supply, as compared to the corresponding, e.g. non-transformed, wild type plant. A prolonged growth comprises survival and/or continued growth of the plant, at the moment when the non-transformed wild type plant shows visual symptoms of deficiency and/or death.

[0064] Therefore, the present invention relates to a method for producing a trans-genic plant with increased yield, in particular an increased yield-related trait, e.g. an increased nutrient use efficiency, such as an enhanced nitrogen use efficiency and/or increased tolerance to environmental stress and/or increased biomass production as compared to a corresponding, e.g. non-transformed, wild type plant, which comprises the following steps:
[0065] (a) Reducing, repressing or deleting of one or more activities selected from the group consisting of At1g74730-protein, At3g63270-protein, protein kinase, protein serine/threonine phosphatase, and SET domain-containing protein, in a plant cell, a plant or a part thereof, and
[0066] (b) generating a transformed plant with enhanced yield, in particular with an enhanced yield-related trait, e.g. nitrogen use efficiency and/or increased biomass production as compared to a corresponding, e.g. non-transformed, wild type plant and growing under conditions which permit the development of the plant.

[0067] In one embodiment the transgenic plant, shows an improved yield-related trait.

[0068] For example, the transgenic plant of the invention shows an enhanced nitrogen use efficiency.

[0069] In another embodiment the transgenic plant shows an increase in biomass production and/or yield under conditions of limited nitrogen supply.

[0070] For example, the nitrogen use efficiency can be determined according to the method described in the examples. Accordingly, in one embodiment, the present invention relates to a method for increasing the yield, comprising the following steps:
[0071] (a) measuring the nitrogen content in the soil, and
[0072] (b) determining, whether the nitrogen-content in the soil is optimal or suboptimal for the growth of an origin or wild type plant, e.g. a crop, and
[0073] (c1) growing the plant of the invention in said soil, if the nitrogen-content is suboptimal for the growth of the origin or wild type plant, or
[0074] (c2) growing the plant of the invention in the soil and comparing the yield with the yield of a standard, an origin or a wild type plant, selecting and growing the plant, which shows the highest yield, if the nitrogen-content is optimal for the origin or wild type plant.

[0075] In a further embodiment of the present invention, plant yield is increased by increasing the plant's stress tolerance(s). Generally, the term “increased tolerance to stress” can be defined as survival of plants, and/or higher yield production, under stress conditions as compared to a non-transformed wild type or starting plant: For example, the plant of the invention or produced according to the method of the invention is better adapted to the stress conditions.”

[0076] During its life-cycle, a plant is generally confronted with a diversity of environmental conditions. Any such conditions, which may, under certain circumstances, have an impact on plant yield, are herein referred to as “stress” condition. Environmental stresses may generally be divided into biotic and abiotic (environmental) stresses. Unfavorable nutrient conditions are sometimes also referred to as “environmental stress”. The present invention does also contemplate solutions for this kind of environmental stress, e.g. referring to increased nutrient use efficiency.

[0077] For example, plant yield is increased by increasing the abiotic stress tolerance(s) of a plant. For the purposes of the description of the present invention, the terms “enhanced tolerance to abiotic stress”, “enhanced resistance to abiotic environmental stress”, “enhanced tolerance to environmental stress”, “improved adaptation to environmental stress” and other variations and expressions similar in its meaning are used interchangeably and refer, without limitation, to an improvement in tolerance to one or more abiotic environmental stress(es) as described herein and as compared to a corresponding origin or wild type plant or a part thereof.

[0078] The term abiotic stress tolerance(s) refers for example low temperature tolerance, drought tolerance or improved water use efficiency (WUE), heat tolerance, salt stress tolerance and others. Studies of a plant's response to desiccation, osmotic shock, and temperature extremes are also employed to determine the plant's tolerance or resistance to abiotic stresses.

[0079] Stress tolerance in plants like low temperature, drought, heat and salt stress tolerance can have a common theme important for plant growth, namely the availability of water. Plants are typically exposed during their life cycle to conditions of reduced environmental water content. The protection strategies are similar to those of chilling tolerance.

[0080] Accordingly, the yield-related trait relates to an increased water use efficiency of the plant of the invention and/or an increased tolerance to drought conditions of the plant of the invention. Water use efficiency (WUE) is a parameter often correlated with drought tolerance. An increase in biomass at low water availability may be due to relatively improved efficiency of growth or reduced water consumption. In selecting traits for improving crops, a decrease in water use, without a change in growth would have particular merit in an irrigated agricultural system where the water input costs were high. An increase in growth without a corresponding jump in water use would have applicability to all agricultural systems. In many agricultural systems where water supply is not limiting, an increase in growth, even if it came at the expense of an increase in water use also increases yield.

[0081] When soil water is depleted or if water is not available during periods of drought, crop yields are restricted. Plant water deficit develops if transpiration from leaves exceeds the supply of water from the roots. The available water supply is related to the amount of water held in the soil and the ability of the plant to reach that water with its root system. Transpiration of water from leaves is linked to the fixation of carbon dioxide by photosynthesis through the stomata. The two processes are positively correlated so that high carbon dioxide influx through photosynthesis is closely linked to water loss by transpiration. As water transpires from the leaf, leaf water potential is reduced and the stomata tend to close in a hydraulic process limiting the amount of photosynthesis. Since crop yield is dependent on the fixation of carbon dioxide in photosynthesis, water uptake and transpiration are contributing factors to crop yield. Plants which are able to use less water to fix the same amount of carbon dioxide or which are able to function normally at a lower water potential have the potential to conduct more photosynthesis and thereby to produce more biomass and economic yield in many agricultural systems.

[0082] Drought stress means any environmental stress which leads to a lack of water in plants or reduction of water supply to plants, including a secondary stress by low temperature and/or salt, and/or a primary stress during drought or heat, e.g. desiccation etc.

[0083] For example, increased tolerance to drought conditions can be determined and quantified according to the following method: Plants of the invention are grown individually in pots in a growth chamber (York Industriekälte GmbH, Mannheim, Germany). Germination is induced. In case the plants are Arabidopsis thaliana sown seeds are kept at 4° C., in the dark, for 3 days in order to induce germination. Subsequently conditions are changed for 3 days to 20° C./6° C. day/night temperature with a 16/8 h day-night cycle at 150 μE/m²s. Subsequently the plants are grown under standard growth conditions. In case the plants are Arabidopsis thaliana, the standard growth conditions are: photoperiod of 16 h light and 8 h dark, 20° C., 60% relative humidity, and a photon flux density of 200 μE. Plants are grown and cultured until they develop leaves. In case the plants are Arabidopsis thaliana they are watered daily until they were approximately 3 weeks old. Starting at that time drought was imposed by withholding water. After the wild type plants show visual symptoms of injury, the evaluation starts and plants are scored for symptoms of drought symptoms and biomass production comparison to wild type and neighboring plants for 5-6 days in succession. In one embodiment, the tolerance to drought, e.g. the tolerance to cycling drought is determined according to the method described in the examples.

[0084] The tolerance to drought can be a tolerance to cycling drought.

[0085] Accordingly, in one embodiment, the present invention relates to a method for increasing the yield, comprising the following steps:
[0086] (a) determining, whether the water supply in the area for planting is optimal or suboptimal for the growth of an origin or wild type plant, e.g. a crop, and/or determining the visual symptoms of injury of plants growing in the area for planting; and
[0087] (b1) growing the plant of the invention in said soil, if the water supply is suboptimal for the growth of an origin or wild type plant or visual symptoms for drought can be found at a standard, origin or wild type plant growing in the area; or
[0088] (b2) growing the plant of the invention in the soil and comparing the yield with the yield of a standard, an origin or a wild type plant and selecting and growing the plant, which shows the highest yield, if the water supply is optimal for the origin or wild type plant.
   Visual symptoms of injury stating for one or any combination of two, three or more of the following features:
[0089] a) wilting
[0090] b) leaf browning
[0091] c) loss of turgor, which results in drooping of leaves or needles stems, and flowers,
[0092] d) drooping and/or shedding of leaves or needles,
[0093] e) the leaves are green but leaf angled slightly toward the ground compared with controls,
[0094] f) leaf blades begun to fold (curl) inward,
[0095] g) premature senescence of leaves or needles,
[0096] h) loss of chlorophyll in leaves or needles and/or yellowing.
   Said yield-related trait of the plant of the invention can be an increased tolerance to heat conditions of said plant.

[0097] In-another embodiment of the present invention, said yield-related trait of the plant of the invention is an increased low temperature tolerance of said plant, e.g. comprising freezing tolerance and/or chilling tolerance.

[0098] In an embodiment thereof, the term “enhanced tolerance to abiotic environmental stress” in a photosynthetic active organism means that the photosynthetic active organism, preferably a plant, when confronted with abiotic environmental stress conditions exhibits an enhanced dry biomass yield as compared to a corresponding, e.g. non-transformed, wild type photosynthetic active organism like a plant.

[0099] In an embodiment thereof, the term “enhanced tolerance to abiotic environmental stress” in a photosynthetic active organism means that the photosynthetic active organism, preferably a plant, when confronted with abiotic environmental stress conditions exhibits an enhanced aerial dry biomass yield as compared to a corresponding, e.g. non-transformed, wild type photosynthetic active organism.

[0100] In an embodiment thereof, the term “enhanced tolerance to abiotic environmental stress” in a photosynthetic active organism means that the photosynthetic active organism, preferably a plant, when confronted with abiotic environmental stress conditions exhibits an enhanced underground dry biomass yield as compared to a corresponding, e.g. non-transformed, wild type photosynthetic active organism.

[0101] In another embodiment thereof, the term “enhanced tolerance to abiotic environmental stress” in a photosynthetic active organism means that the photosynthetic active organism, preferably a plant, when confronted with abiotic environmental stress conditions exhibits an enhanced fresh weight biomass yield as compared to a corresponding, e.g. non-transformed, wild type photosynthetic active organism.

[0102] In an embodiment thereof, the term “enhanced tolerance to abiotic environmental stress” in a photosynthetic active organism means that the photosynthetic active organism, preferably a plant, when confronted with abiotic environmental stress conditions exhibits an enhanced aerial fresh weight biomass yield as compared to a corresponding, e.g. non-transformed, wild type photosynthetic active organism.

[0103] In an embodiment thereof, the term “enhanced tolerance to abiotic environmental stress” in a photosynthetic active organism means that the photosynthetic active organism, preferably a plant, when confronted with abiotic environmental stress conditions exhibits an enhanced underground fresh weight biomass yield as compared to a corresponding, e.g. non-transformed, wild type photosynthetic active organism.

[0104] In another embodiment thereof, the term “enhanced tolerance to abiotic environmental stress” in a photosynthetic active organism means that the photosynthetic active organism, preferably a plant, when confronted with abiotic environmental stress conditions exhibits an enhanced yield of harvestable parts of a plant as compared to a corresponding, e.g. non-transformed, wild type photosynthetic active organism.

[0105] In an embodiment thereof, the term “enhanced tolerance to abiotic environmental stress” in a photosynthetic active organism means that the photosynthetic active organism, preferably a plant, when confronted with abiotic environmental stress conditions exhibits an enhanced yield of dry harvestable parts of a plant as compared to a corresponding, e.g. non-transformed, wild type photosynthetic active organism.

[0106] In an embodiment thereof, the term “enhanced tolerance to abiotic environmental stress” in a photosynthetic active organism means that the photosynthetic active organism, preferably a plant, when confronted with abiotic environmental stress conditions exhibits an enhanced yield of dry aerial harvestable parts of a plant as compared to a corresponding, e.g. non-transformed, wild type photosynthetic active organism.

[0107] In an embodiment thereof, the term “enhanced tolerance to abiotic environmental stress” in a photosynthetic active organism means that the photosynthetic active organism, preferably a plant, when confronted with abiotic environmental stress conditions exhibits an enhanced yield of underground dry harvestable parts of a plant as compared to a corresponding, e.g. non-transformed, wild type photosynthetic active organism.

[0108] In another embodiment thereof, the term “enhanced tolerance to abiotic environmental stress” in a photosynthetic active organism means that the photosynthetic active organism, preferably a plant, when confronted with abiotic environmental stress conditions exhibits an enhanced yield of fresh weight harvestable parts of a plant as compared to a corresponding, e.g. non-transformed, wild type photosynthetic active organism.

[0109] In an embodiment thereof, the term “enhanced tolerance to abiotic environmental stress” in a photosynthetic active organism means that the photosynthetic active organism, preferably a plant, when confronted with abiotic environmental stress conditions an enhanced yield of aerial fresh weight harvestable parts of a plant as compared to a corresponding, e.g. non-transformed, wild type photosynthetic active organism.

[0110] In an embodiment thereof, the term “enhanced tolerance to abiotic environmental stress” in a photosynthetic active organism means that the photosynthetic active organism, preferably a plant, when confronted with abiotic environmental stress conditions exhibits an enhanced yield of underground fresh weight harvestable parts of a plant as compared to a corresponding, e.g. non-transformed, wild type photosynthetic active organism.

[0111] In a further embodiment, the term “enhanced tolerance to abiotic environmental stress” in a photosynthetic active organism means that the photosynthetic active organism, preferably a plant, when confronted with abiotic environmental stress conditions exhibits an enhanced yield of the crop fruit as compared to a corresponding, e.g. non-transformed, wild type photosynthetic active organism.

[0112] In an embodiment thereof, the term “enhanced tolerance to abiotic environmental stress” in a photosynthetic active organism means that the photosynthetic active organism, preferably a plant, when confronted with abiotic environmental stress conditions exhibits an enhanced yield of the fresh crop fruit as compared to a corresponding, e.g. non-transformed, wild type photosynthetic active organism.

[0113] In an embodiment thereof, the term “enhanced tolerance to abiotic environmental stress” in a photosynthetic active organism means that the photosynthetic active organism, preferably a plant, when confronted with abiotic environmental stress conditions exhibits an enhanced yield of the dry crop fruit as compared to a corresponding, e.g. non-transformed, wild type photosynthetic active organism.

[0114] In an embodiment thereof, the term “enhanced tolerance to abiotic environmental stress” in a photosynthetic active organism means that the photosynthetic active organism, preferably a plant, when confronted with abiotic environmental stress conditions exhibits an enhanced grain dry weight as compared to a corresponding, e.g. non-transformed, wild type photosynthetic active organism.

[0115] In a further embodiment, the term “enhanced tolerance to abiotic environmental stress” in a photosynthetic active organism means that the photosynthetic active organism, preferably a plant, when confronted with abiotic environmental stress conditions exhibits an enhanced yield of seeds as compared to a corresponding, e.g. non-transformed, wild type photosynthetic active organism.

[0116] In an embodiment thereof, the term “enhanced tolerance to abiotic environmental stress” in a photosynthetic active organism means that the photosynthetic active organism, preferably a plant, when confronted with abiotic environmental stress conditions exhibits an enhanced yield of fresh weight seeds as compared to a corresponding, e.g. non-transformed, wild type photosynthetic active organism.

[0117] In an embodiment thereof, the term “enhanced tolerance to abiotic environmental stress” in a photosynthetic active organism means that the photosynthetic active organism, preferably a plant, when confronted with abiotic environmental stress conditions exhibits an enhanced yield of dry seeds as compared to a corresponding, e.g. non-transformed, wild type photosynthetic active organism. For example, the abiotic environmental stress conditions, the organism is confronted with can, however, be any of the abiotic environmental stresses mentioned herein.

[0118] An increased nitrogen use efficiency of the produced corn relates in one embodiment to an improved protein content of the corn seed, in particular in corn seed used as feed. Increased nitrogen use efficiency relates in another embodiment to an increased kernel size or number. A increased water use efficiency of the produced corn relates in one embodiment to an increased kernel size or number. Further, an increased tolerance to low temperature relates in one embodiment to an early vigor and allows the early planting and sowing of a corn plant produced according to the method of the present invention.

[0119] A increased nitrogen use efficiency of the produced soy plant relates in one embodiment to an improved protein content of the soy seed, in particular in soy seed used as feed. Increased nitrogen use efficiency relates in another embodiment to an increased kernel size or number. A increased water use efficiency of the produced soy plant relates in one embodiment to an increased kernel size or number. Further, an increased tolerance to low temperature relates in one embodiment to an early vigor and allows the early planting and sowing of a soy plant produced according to the method of the present invention.

[0120] A increased nitrogen use efficiency of the produced OSR plant relates in one embodiment to an improved protein content of the OSR seed, in particular in OSR seed used as feed. Increased nitrogen use efficiency relates in another embodiment to an increased kernel size or number. A increased water use efficiency of the produced OSR plant relates in one embodiment to an increased kernel size or number. Further, an increased tolerance to low temperature relates in one embodiment to an early vigor and allows the early planting and sowing of a soy plant produced according to the method of the present invention. In one embodiment, the present invention relates to a method for the production of hardy oil seed rape (OSR with winter hardness) comprising using a hardy oil seed rape plant in the above mentioned method of the invention.

[0121] A increased nitrogen use efficiency of the produced cotton plant relates in one embodiment to an improved protein content of the cotton seed, in particular in cotton seed used for feeding. Increased nitrogen use efficiency relates in another embodiment to an increased kernel size or number. A increased water use efficiency of the produced cotton plant relates in one embodiment to an increased kernel size or number. Further, an increased tolerance to low temperature relates in one embodiment to an early vigor and allows the early planting and sowing of a soy plant produced according to the method of the present invention.

[0122] Thus, in one further embodiment of the present invention, a method is provided for producing a transgenic plant; progenies, seeds, and/or pollen derived from such plant or for the production of such a plant; each plant can also show an increased low temperature tolerance, particularly chilling tolerance, as compared to a corresponding, e.g. non-transformed, wild type plant cell or plant, by reducing, repressing or deleting one or more of said “activities” in the subcellular compartment and tissue indicated herein in said plant.

[0123] Thus, in one further embodiment of the present invention, a method is provided for producing a transgenic plant; progenies, seeds, and/or pollen derived from such plant or for the production of such a plant; each plant can also show improved water use efficiency or increased drought tolerance as compared to a corresponding, e.g. non-transformed, wild type plant cell or plant, by Reducing, repressing or deleting one or more of said Activities in the subcellular compartment and tissue indicated herein in said plant.

[0124] Thus, in one further embodiment of the present invention, a method is provided for producing a transgenic plant; progenies, seeds, and/or pollen derived from such plant or for the production of such a plant; each plant can show nitrogen use efficiency (NUE) as well as an increased low temperature tolerance and/or increased intrinsic yield and/or drought tolerance, particularly chilling tolerance, and draught tolerance as compared to a corresponding, e.g. non-transformed, wild type plant cell or plant, by reducing, repressing or deleting one or more of said Activities in the subcellular compartment and tissue indicated herein in said plant.

[0125] Thus, in one further embodiment of the present invention, a method is provided for producing a transgenic plant; progenies, seeds, and/or pollen derived from such plantor for the production of such a plant; each plant can show an increased nitrogen use efficiency (NUE) as well as low temperature tolerance or increased drought tolerance or increased intrinsic yield, particularly chilling tolerance, and draught tolerance and increase biomass as compared to a corresponding, e.g. non-transformed, wild type plant cell or plant, by reducing, repressing or deleting one or more of said Activities as well as in the subcellular compartment and tissue indicated herein in said plant.

[0126] Thus, in one further embodiment of the present invention, a method is provided for producing a transgenic plant; progenies, seeds, and/or pollen derived from such or for the production of such a plant; each plant can show an increased nitrogen use efficiency (NUE) and low temperature tolerance and increased drought tolerance and increased intrinsic yield, particularly chilling tolerance, and draught tolerance and increase biomass as compared to a corresponding, e.g. non-transformed, wild type plant cell or plant, by reducing, repressing or deleting one or more of said Activities in the subcellular compartment and tissue indicated herein in said plant.

[0127] Furthermore, in one embodiment, the present invention provides a transgenic plant showing one or more increased yield-related trait as compared to the corresponding, e.g. non-transformed, origin or wild type plant cell or plant, by reducing, repressing or deleting one or more activities selected from the above mentioned group of Activities in the subcellular compartment and tissue indicated herein in said plant.

[0128] Thus, in one further embodiment of the present invention, a method is provided for producing a transgenic plant; progenies, seeds, and/or pollen derived from such plant or for the production of such a plant; each showing an increased low temperature tolerance and nitrogen use efficiency (NUE) as compared to a corresponding, e.g. non-transformed, wild type plant cell or plant, by reducing, repressing or deleting one or more of said “activities”.

[0129] Thus, in one further embodiment of the present invention, a method is provided for producing a transgenic plant; progenies, seeds, and/or pollen derived from such plant or for the production of such a plant; each showing an increased an improved NUE and increased cycling drought tolerance as compared to a corresponding, e.g. non-transformed, wild type plant cell or plant, by reducing, repressing or deleting one or more of said “activities”.

[0130] Thus, in one further embodiment of the present invention, a method is provided for producing a transgenic plant; progenies, seeds, and/or pollen derived from such plant or for the production of such a plant; each showing an increased an increased NUE and increased intrinsic yield, as compared to a corresponding, e.g. non-transformed, wild type plant cell or plant, by reducing, repressing or deleting one or more of said “activities”.

[0131] In one embodiment, said activity is reduced, repressed or deleted in one or more specific compartments of a cell and confers an increased yield, e.g. the plant shows an increased or improved said yield-related trait. For example, said activity is reduced, repressed or deleted in the plastid of a cell as indicated in table I or II in column 6 and increases yield in a corresponding plant.

[0132] Further, in another embodiment, the present invention relates to a method for producing a transgenic plant with increased yield, in particular an increased yield-related trait, e.g. an increased nutrient use efficiency, such as an enhanced nitrogen use efficiency and/or increased tolerance to environmental stress and/or increased biomass production as compared to a corresponding, e.g. non-transformed, wild type plant, which comprises the following steps:
[0133] (a) reduction, repression or deletion of the activity of
   [0134] (i) a polypeptide comprising a polypeptide, a consensus sequence or at least one polypeptide motif as depicted in column 5 or 7 of table II or of table IV, respectively; or
   [0135] (ii) an expression product of a nucleic acid molecule comprising a polynucleotide as depicted in column 5 or 7 of table I,
   [0136] (iii) or a functional equivalent of (i) or (ii);
      in a plant cell, a plant or a part thereof, and
[0137] (b) generating a transformed plant with increased yield, in particular an increased yield-related trait, e.g. an increased nutrient use efficiency, such as an enhanced nitrogen use efficiency and/or increased tolerance to environmental stress and/or increased biomass production as compared to a corresponding, e.g. non-transformed, wild type plant and growing under conditions which permit the development of the plant.

[0138] Preferably, the process of the invention further comprises reducing, decreasing or deleting the expression or activity of at least one nucleic acid molecule having or encoding the activity of at least one nucleic acid molecule represented by the nucleic acid molecule as depicted in column 5 of table I, application no. 1, and comprising a nucleic acid molecule which is selected from the group consisting of:
[0139] (a) an isolated nucleic acid molecule encoding the polypeptide as depicted in column 5 or 7 of table II, application no. 1;
[0140] (b) an isolated nucleic acid molecule as depicted in column 5 or 7 of table I, application no. 1,
[0141] (c) an isolated nucleic acid molecule, which, as a result of the degeneracy of the genetic code, can be derived from a polypeptide sequence as depicted in column 5 or 7 of table II, application no. 1;
[0142] (d) an isolated nucleic acid molecule having at least 30% identity with the nucleic acid molecule sequence of a polynucleotide comprising the nucleic acid molecule as depicted in column 5 or 7 of table I, application no. 1;
[0143] (e) an isolated nucleic acid molecule encoding a polypeptide having at least 30% identity, preferably at least 40%, 50%, 60%, 70%, 75%, 80%, 85%, 90%, 95%, 96%, 97%, 98%, 99%, 99.5%, with the amino acid sequence of the polypeptide encoded by the nucleic acid molecule of (a) to (c) and having the activity represented by a nucleic acid molecule comprising a polynucleotide as depicted in column 5 of table I, application no. 1;
[0144] (f) an isolated nucleic acid molecule encoding a polypeptide which can be isolated with the aid of monoclonal or polyclonal antibodies made against a polypeptide encoded by one of the nucleic acid molecules of (a) to (e) and having the activity represented by the nucleic acid molecule comprising a polynucleotide as depicted in column 5 of table I, application no. 1;
[0145] (g) an isolated nucleic acid molecule encoding a polypeptide comprising the consensus sequence or one or more polypeptide motifs as depicted in column 7 of table IV, application no. 1, and preferably having the activity represented by a nucleic acid molecule comprising a polynucleotide as depicted in column 5 of table II or IV, application no. 1,
[0146] (h) an isolated nucleic acid molecule encoding a polypeptide having the activity represented by a protein as depicted in column 5 of table II, application no. 1;
[0147] (i) an isolated nucleic acid molecule which comprises a polynucleotide, which is obtained by amplifying a cDNA library or a genomic library using the primers as depicted in column 7 of table III, application no. 1, which do not start at their 5′-end with the nucleotides ATA and preferably having the activity represented by a nucleic acid molecule comprising a polynucleotide as depicted in column 5 of table II or IV, application no. 1
[0148] (j) an isolated nucleic acid molecule encoding a polypeptide, the polypeptide being derived by substituting, deleting and/or adding one or more amino acids of the amino acid sequence of the polypeptide encoded by the nucleic acid molecules (a) to (d); and
[0149] (k) an isolated nucleic acid molecule which is obtainable by screening a suitable nucleic acid library under stringent hybridization conditions with a probe comprising a complementary sequence of a nucleic acid molecule of (a) or (b) or with a fragment thereof, having at least 15 nt, preferably 20 nt, 30 nt, 50 nt, 100 nt, 200 nt, 500 nt, 750 nt or 1000 nt of a nucleic acid molecule complementary to a nucleic acid molecule sequence characterized in (a) to (d) and encoding a polypeptide having the activity represented by a protein comprising a polypeptide as depicted in column 5 of table II, application no. 1;
   or which comprises a sequence which is complementary thereto;

[0150] Preferably, the process of the invention comprises further reducing, repressing, decreasing or deleting of an expression product of a nucleic acid molecule comprising a nucleic acid molecule as depicted in (a) to (j) above, e.g. a polypeptide comprising a polypeptide as depicted in column 5 or 7 of table II, application no. 1, or of a protein encoded by said nucleic acid molecule.

[0151] Preferably, the process of the invention comprises further the reduction of the activity or expression of a polypeptide comprising a polypeptide encoded by the nucleic acid molecule characterized above in a plant or part thereof.

[0152] Preferably, the process of the invention comprises further at least one step selected from the group consisting of:
[0153] (a) introducing of a nucleic acid molecule encoding a ribonucleic acid sequence, which is able to form a double-stranded ribonucleic acid molecule, whereby a fragment of at least 17 nt of said double-stranded ribonucleic acid molecule has a homology of at least 50%, preferably 60%, 70%, 80%, 90%, 95%, 97%, 98%, 99%, to a nucleic acid molecule selected from the group of
   [0154] (i) an isolated nucleic acid molecule as characterized above;
   [0155] (ii) an isolated nucleic acid molecule as depicted in column 5 or 7 of table I, application no. 1, or encoding a polypeptide as depicted in column 5 or 7 of table II, application no. 1, and
   [0156] (ii) an isolated nucleic acid molecule encoding a polypeptide having the activity of polypeptide depicted in column 5 of table II, application no. 1, or encoding the expression product of a polynucleotide comprising a nucleic acid molecule as depicted in column 5 or 7 of table I, application no. 1;
[0157] (b) introducing an RNAi, snRNA, dsRNA, siRNA, miRNA, ta-siRNA, cosuppression molecule, ribozyme, or antisense nucleic acid molecule, whereby the RNAi, snRNA, dsRNA, siRNA, miRNA, ta-siRNA, cosuppression molecule, ribozyme, or antisense nucleic acid molecule comprises a fragment of at least 17 nt with a homology of at least 50% preferably 60%, 70%, 80%, 90%, 95%, 97%, 98%, 99%, to a nucleic acid molecule selected from the group defined in section (a) of this paragraph;
[0158] (c) introducing of a ribozyme which specifically cleaves a nucleic acid molecule selected from the group defined in section (a) of this paragraph;
[0159] (d) introducing of the RNAi, snRNA, dsRNA, siRNA, miRNA, ta-siRNA, cosuppression molecule, ribozyme, or antisense nucleic acid molecule characterized in (b) and the ribozyme characterized in (c);
[0160] (e) introducing of a sense nucleic acid molecule conferring the expression of a nucleic acid molecule comprising a nucleic acid molecule selected from the group defined herein above or defined in section (a) (ii) or (a) (iii) above or a nucleic acid molecule encoding a polypeptide having at least 50% identity with the amino acid sequence of the polypeptide encoded by the nucleic acid molecule mentioned in section (a) to (c) and having the activity represented by a protein comprising a polypeptide as depicted in column 5 of table II, application no. 1, for inducing a co-suppression of the endogenous expression product;
[0161] (f) introducing a nucleic acid molecule conferring the expression of a dominant-negative mutant of a protein having the activity of a protein as depicted in column 5 or 7 of table II, application no. 1, or comprising a polypeptide being encoded by a nucleic acid molecule as characterized herein above;
[0162] (g) introducing a nucleic acid molecule encoding a factor, which binds to a nucleic acid molecule comprising a nucleic acid molecule selected from the group defined herein above or defined in section (a) (ii) or (a) (iii) of this paragraph conferring the expression of a protein having the activity of a protein encoded by a nucleic acid molecule as characterized herein above;
[0163] (h) introducing a viral nucleic acid molecule conferring the decline of a RNA molecule comprising a nucleic acid molecule selected from the group defined herein above or defined in section (a) (ii) or (a) (iii) of this paragraph conferring the expression of a protein encoded by a nucleic acid molecule as characterized herein above;
[0164] (i) introducing a nucleic acid construct capable to recombine with and silence, inactivate, repress or reduces the activity of an endogenous gene comprising a nucleic acid molecule selected from the group defined herein above or defined in section (a) (ii) or (a) (iii) of this paragraph conferring the expression of a protein encoded by a nucleic acid molecule as characterized herein above;
[0165] (j) introducing a non-silent mutation in an endogenous gene comprising a nucleic acid molecule selected from the group defined herein above or defined in section (a) (ii) or (a) (iii) of this paragraph; and
[0166] (k) introducing an expression construct conferring the expression of nucleic acid molecule characterized in any one of (a) to (i).

[0167] Preferably, in the process of the invention, a fragment of at least 17 by of a 3′- or 5′-nucleic acid sequence of a sequences comprising a nucleic acid molecule selected from the group defined herein above or defined in section (a) (ii) or (a) (iii) above with an identity of at least 50%, preferably at least 60%, 70%, 75%, 80%, 85%, 90%, 95%, 96%, 97%, 98%, 99%, 99.5%, is used for the reduction of the nucleic acid molecule characterized above or the polypeptide encoded by said nucleic acid molecule.

[0168] Preferably, in the process of the invention, the reduction or deletion is caused by applying a chemical compound of a non-human-organism.

[0169] Preferably, in the process of the invention, the plant is selected from the group consisting of Anacardiaceae, Asteraceae, Apiaceae, Betulaceae, Boraginaceae, Brassicaceae, Bromeliaceae, Caricaceae, Cannabaceae, Convolvulaceae, Chenopodiaceae, Cucurbitaceae, Elaeagnaceae, Ericaceae, Euphorbiaceae, Fabaceae, Geraniaceae, Gramineae, Juglandaceae, Lauraceae, Leguminosae, Linaceae, perennial grass, fodder crops, vegetables and ornamentals.

[0170] Preferably, the process of the invention further comprises the step, introduction of a RNAi, snRNA, dsRNA, siRNA, miRNA, ta-siRNA, cosuppression molecule, ribozyme, antibody and/or antisense nucleic that has been designed to target the expression product of a gene comprising the nucleic acid molecule as characterized herein above to induce a breakdown of the mRNA of the said gene of interest and thereby silence the gene expression, or of an expression cassette ensuring the expression of the former.

[0171] Further, in another embodiment, the present invention relates to an isolated nucleic acid molecule, which comprises a nucleic acid molecule selected from the group consisting of:
[0172] (a) an isolated nucleic acid molecule which encodes a polypeptide comprising the polypeptide as depicted in column 5 or 7 of table II B, application no. 1, or;
[0173] (b) an isolated nucleic acid molecule which comprising a polynucleotide as depicted in column 5 or 7 of table I B, application no. 1, or;
[0174] (c) an isolated nucleic acid molecule comprising a nucleic acid sequence, which, as a result of the degeneracy of the genetic code, can be derived from a polypeptide sequence as depicted in column 5 or 7 of Table II B and having the activity represented by the protein as depicted in column 5 of table II, application no. 1;
[0175] (d) an isolated nucleic acid molecule encoding a polypeptide having at least 50% identity, preferably at least 60%, 70%, 75%, 80%, 85%, 90%, 95%, 96%, 97%, 98%, 99%, 99.5%, with the amino acid sequence of a polypeptide encoded by the nucleic acid molecule of (a) or (c) and having the activity represented by the protein as depicted in column 5 of table II, application no. 1;
[0176] (e) an isolated nucleic acid molecule encoding a polypeptide, which is isolated with the aid of monoclonal antibodies against a polypeptide encoded by one of the nucleic acid molecules of (a) to (c) and having the activity represented by the protein as depicted in column 5 of table II, application no. 1;
[0177] (f) an isolated nucleic acid molecule encoding a polypeptide comprising the consensus sequence or a polypeptide motif as depicted in column 7 of table IV and having the biological activity represented by the protein as depicted in column 5 of Table II;
[0178] (g) an isolated nucleic acid molecule encoding a polypeptide having the activity represented by a protein as depicted in column 5 of table II, application no. 1;
[0179] (h) an isolated nucleic acid molecule which comprises a polynucleotide, which is obtained by amplifying a cDNA library or a genomic library using the primers as depicted in column 7 of table III, application no. 1, which do not start at their 5′-end with the nucleotides ATA; and
[0180] (i) an isolated nucleic acid molecule which is obtainable by screening a suitable library under stringent hybridization conditions with a probe comprising one of the sequences of the nucleic acid molecule of (a) to (c) or with a fragment of at least 17 nt of the nucleic acid molecule characterized in any one of (a) to (h) and encoding a polypeptide having the activity represented by the protein as depicted in column 5 of table II, application no. 1;
   or which comprises a sequence which is complementary thereto;
   whereby the nucleic acid molecule according to (a) to (i) is at least in one or more nucleotides different from the sequence as depicted in column 5 or 7 of table I A, application no. 1, and preferably which encodes a protein which differs at least in one or more amino acids from the protein sequences as depicted in column 5 or 7 of table II A, application no. 1.

[0181] Further, in another embodiment, the present invention relates to an RNAi, snRNA, dsRNA, siRNA, miRNA, ta-siRNA, cosuppression molecule, ribozyme, antibody or antisense nucleic acid molecule for the reduction of the activity characterized above or of the activity or expression of a nucleic acid molecule as characterized herein above or a polypeptide encoded by said nucleic acid molecule.

[0182] Preferably, the RNAi, snRNA, dsRNA, siRNA, miRNA, ta-siRNA, cosuppression molecule, ribozyme, or antisense nucleic acid molecule of the invention comprises a fragment of at least 17 nt of the nucleic acid molecule defined herein above.

[0183] Further, in another embodiment, the present invention relates to a double-stranded RNA (dsRNA), RNAi, snRNA, siRNA, miRNA, antisense or ta-siRNA molecule or ribozyme, which is able to form a double-stranded ribonucleic acid molecule, whereby a fragment of at least 17 nt of said double-stranded ribonucleic acid molecule has a homology of at least 50%, preferably at least 60%, 70%, 75%, 80%, 85%, 90%, 95%, 96%, 97%, 98%, 99%, 99.5%, to a nucleic acid molecule selected from the group consisting of
[0184] (aa) an isolated nucleic acid molecule as characterized herein above;
[0185] (ab) an isolated nucleic acid molecule as depicted in column 5 or 7 of table I, application no. 1, or encoding a polypeptide as depicted in column 5 or 7 of table II, application no. 1, and
[0186] (ac) an isolated nucleic acid molecule encoding a polypeptide having the activity of polypeptide as depicted in column 5 or 7 of table II or encoding the expression product of a polynucleotide comprising a nucleic acid molecule as depicted in column 5 or 7 of table I, application no. 1.

[0187] Preferably, in the dsRNA molecule of the invention, the sense strand and the antisense strand are covalently bound to each other and the antisense strand is essentially the complement of the “sense”-RNA strand.

[0188] Further, in another embodiment, the present invention relates to a viral nucleic acid molecule conferring the decline of an RNA molecule conferring the expression of a protein having the activity characterized above or of the activity or expression of a nucleic acid molecule as characterized herein above or a polypeptide encoded by said nucleic acid molecule.

[0189] Further, in another embodiment, the present invention relates to a TILLING primer for the identification of a knock out of a gene comprising a nucleic acid sequence of a nucleic acid molecule as depicted in any one column 5 or 7 of table I, application no. 1.

[0190] Further, in another embodiment, the present invention relates to a dominant-negative mutant of polypeptide comprising a polypeptide as depicted in column 5 or 7 of table II, application no. 1.

[0191] Further, in another embodiment, the present invention relates to a nucleic acid molecule encoding the dominant negative mutant defined above.

[0192] Further, in another embodiment, the present invention relates to a nucleic acid construct conferring the expression of the RNAi, snRNA, dsRNA, siRNA, miRNA, ta-siRNA, cosuppression molecule, ribozyme, antibody or antisense nucleic acid molecule of the invention, the viral nucleic acid molecule of the invention or the nucleic acid molecule of the invention.

[0193] Further, in another embodiment, the present invention relates to a nucleic acid construct comprising the isolated nucleic acid molecule of the invention or the RNAi, snRNA, dsRNA, siRNA, miRNA, ta-siRNA, cosuppression molecule, ribozyme, or antisense nucleic acid molecule of the invention, or the viral nucleic acid molecule of the invention, wherein the nucleic acid molecule is functionally linked to one or more regulatory signals.

[0194] Further, in another embodiment, the present invention relates to a vector comprising the nucleic acid molecule of the invention or the RNAi, snRNA, dsRNA, siRNA, miRNA, ta-siRNA, cosuppression molecule, ribozyme, or antisense nucleic acid molecule of the invention, or the viral nucleic acid molecule of the invention, or the nucleic acid construct of the invention.

[0195] Preferably, in the vector of the invention, the nucleic acid molecule is in operable linkage with regulatory sequences for the expression in a plant host.

[0196] Further, in another embodiment, the present invention relates to a transgenic plant host cell, which has been transformed stably or transiently with the vector of the invention, or the nucleic acid molecule of the invention or the nucleic acid construct of the invention.

[0197] Further, in another embodiment, the present invention relates to a plant cell, a plant or a part thereof, wherein the activity of a protein comprising a polypeptide, a consensus sequence or a polypeptide motif as depicted in column 5 or 7 of table II, application no. 1, preferably Table II B, application no. 1, or table IV, application no. 1, or a nucleic acid molecule comprising a nucleic acid molecule as depicted in column 5 or 7 of table I, application no. 1, preferably table I B, application no. 1, is reduced.

[0198] Further, in another embodiment, the present invention relates to a process for producing a polypeptide encoded by a nucleic acid sequence of the invention, the polypeptide being expressed in a plant cell, a plant or a part thereof, of the invention.

[0199] Preferably, in the process for producing a polypeptide of the invention or in the host cell of the invention, the host cell is a plant cell selected from the group consisting of Anacardiaceae, Asteraceae, Apiaceae, Betulaceae, Boraginaceae, Brassicaceae, Bromeliaceae, Caricaceae, Cannabaceae, Convolvulaceae, Chenopodiaceae, Cucurbitaceae, Elaeagnaceae, Ericaceae, Euphorbiaceae, Fabaceae, Geraniaceae, Gramineae, Juglandaceae, Lauraceae, Leguminosae, Linaceae, perennial grass, fodder crops, vegetables and ornamentals or is a microorganism as defined above.

[0200] Further, in another embodiment, the present invention relates to an isolated polypeptide encoded by a nucleic acid molecule of the invention or comprising the polypeptide as depicted in column 7 of table II B, application no. 1.

[0201] Further, in another embodiment, the present invention relates to an antibody, which specifically binds to the polypeptide of the invention.

[0202] Further, in another embodiment, the present invention relates to a plant tissue, plant, harvested plant material or propagation material of a plant comprising the plant cell of the invention.

[0203] Further, in another embodiment, the present invention relates to a method for screening of an antagonist of an activity as characterized in the process of the invention above or being represented by the polypeptide encoded by the nucleic acid molecule characterized for the process of the invention above:
[0204] (a) contacting an organism, its cells, tissues or parts, which express the polypeptide with a chemical compound or a sample comprising a plurality of chemical compounds under conditions which permit the reduction or deletion of the expression of the nucleic acid molecule encoding the activity represented by the protein or which permit the reduction or deletion of the activity of the protein;
[0205] (b) assaying the level of the activity of the protein or the polypeptide expression level in the plant, its cells, tissues or parts wherein the plant, its cells, tissues or parts is cultured or maintained in; and
[0206] (c) identifying an antagonist by comparing the measured level of the activity of the protein or the polypeptide expression level with a standard level of the activity of the protein or the polypeptide expression level measured in the absence of said chemical compound or a sample comprising said plurality of chemical compounds, whereby an decreased level in comparison to the standard indicates that the chemical compound or the sample comprising said plurality of chemical compounds is an antagonist.

[0207] Further, in another embodiment, the present invention relates to a process for the identification of a compound conferring increased yield, in particular an increased yield-related trait, e.g. an increased nutrient use efficiency, such as an enhanced nitrogen use efficiency and/or increased tolerance to environmental stress and/or increased biomass production as compared to a corresponding, e.g. non-transformed, wild type plant in a plant, comprising the steps:
[0208] (a) culturing or maintaining a plant, plant cell or their tissues or a part thereof expressing the polypeptide having the activity characterized in the process of the invention above or the polypeptide encoded by the nucleic acid molecule characterized in the process of the invention above or a polynucleotide encoding said polypeptide and a readout system capable of interacting with the polypeptide under suitable conditions which permit the interaction of the polypeptide with this readout system in the presence of a chemical compound or a sample comprising a plurality of chemical compounds and capable of providing a detectable signal in response to the binding of a chemical compound to said polypeptide under conditions which permit the depression of said readout system and of said polypeptide; and
[0209] (b) identifying if the chemical compound is an effective antagonist by detecting the presence or absence or decrease or increase of a signal produced by said readout system.

[0210] Further, in another embodiment, the present invention relates to a method for the production of an agricultural composition comprising the steps of the process for the identification of a compound conferring increased yield, in particular an increased yield-related trait, e.g. an increased nutrient use efficiency, such as an enhanced nitrogen use efficiency and/or increased tolerance to environmental stress and/or increased biomass production as compared to a corresponding, e.g. non-transformed, wild type plant in a plant; in a plant cell or part thereof, of the invention and formulating said compound in a form acceptable for an application in agriculture.

[0211] Further, in another embodiment, the present invention relates to a composition comprising the protein of the invention, the nucleic acid molecule of the invention, the nucleic acid construct of the invention, the vector of the invention, the antagonist identified according to the method for identification of an antagonist of the invention, the antibody of the invention, the host cell of the invention, the nucleic acid molecule characterized in the process of the invention, the RNAi, snRNA, dsRNA, siRNA, miRNA, ta-siRNA, cosuppression molecule, ribozyme, or antisense nucleic acid molecule of the invention and optionally a agricultural acceptable carrier.

[0212] Further, in another embodiment, the present invention relates to a food or feed comprising the protein of the invention, the nucleic acid molecule of the invention, the nucleic acid construct of the invention, the vector of the invention, the antagonist identified according to the method for identification of an antagonist of the invention, the antibody of the invention, the host cell of the invention, the nucleic acid molecule characterized in the process of the invention, the RNAi, snRNA, dsRNA, siRNA, miRNA, ta-siRNA, cosuppression molecule, ribozyme, or antisense nucleic acid molecule of the invention, the plant, plant tissue, the harvested plant material or propagation material of a plant of the invention.

[0213] Further, in another embodiment, the present invention relates to use of the protein of the invention, the nucleic acid molecule of the invention, the nucleic acid construct of the invention, the vector of the invention, the antagonist identified according to the method for identification of an antagonist of the invention, the antibody of the invention, the host cell of the invention, the nucleic acid molecule characterized in the process of the invention, the RNAi, snRNA, dsRNA, siRNA, miRNA, ta-siRNA, cosuppression molecule, ribozyme, or antisense nucleic acid molecule of the invention, for producing a transgenic plant with increased yield, in particular an increased yield-related trait, e.g. an increased nutrient use efficiency, such as an enhanced nitrogen use efficiency and/or increased tolerance to environmental stress and/or increased biomass production as compared to a corresponding, e.g. non-transformed, wild type plant.

[0214] Table I shows the SEQ ID NOs. of relevant polynucleotides. Table II shows the SEQ ID NOs. of relevant polypeptides. Table IV shows the SEQ ID NOs. of relevant consensus sequences and relevant polypeptide motifs. In all these tables the abbreviation “A. th.” was used for the organism “Arabidopsis thaliana”.

[0215] In the following, the term “polypeptide as depicted in table II or IV” also relates to a polypeptide comprising the consensus sequence or at least one polypeptide motif as depicted in table IV.

[0216] The molecule which activity is to be reduced according to the process of the invention to provide the increased yield, in particular an increased yield-related trait, e.g. an increased nutrient use efficiency, such as an enhanced nitrogen use efficiency and/or increased tolerance to environmental stress and/or increased biomass production as compared to a corresponding, e.g. non-transformed, wild type plant, e.g. the molecule of I., II. and/or III., below, is in the following the molecule “which activity is to be reduced in the process of the invention”. The molecule can for example be a polypeptide or a nucleic acid molecule.

[0217] Accordingly, in other words, the invention relates to a method for producing a transgenic plant with increased yield, in particular an increased yield-related trait, e.g. an increased nutrient use efficiency, such as an enhanced nitrogen use efficiency and/or increased tolerance to environmental stress and/or increased biomass production as compared to a corresponding, e.g. non-transformed, wild type plant, which comprises the following steps:
[0218] (a) reduction, repression or deletion of the activity of
   [0219] (I) at least one polypeptide comprising a polypeptide selected from the group consisting of SEQ ID NOs 28, 61, 95, 133, and 172 or a homologue thereof as depicted in column 7 of table II, application no. 1, preferably as depicted in table II B, application no. 1, or comprising, a consensus sequence or at least one polypeptide motif of table IV, application no. 1, or
   [0220] (II) at least one expression product of a nucleic acid molecule comprising a polynucleotide selected from the group consisting of SEQ ID NOs 27, 60, 94, 132, and 171 or a homologue thereof as depicted in column 7 of table I, application no. 1, preferably as depicted in column 5 or 7 of table I B, application no. 1,
   [0221] (III) or a functional equivalent of (I) or (II) in a plant or a part thereof; and
[0222] (b) generating a transformed plant with increased yield, in particular an increased yield-related trait, e.g. an increased nutrient use efficiency, such as an enhanced nitrogen use efficiency and/or increased tolerance to environmental stress and/or increased biomass production as compared to a corresponding, e.g. non-transformed, wild type plant and growing under conditions which permit the development of the plant.

[0223] In one embodiment the invention relates to a method for producing a transgenic plant with increased yield, in particular an increased yield-related trait, e.g. an increased nutrient use efficiency, such as an enhanced nitrogen use efficiency and/or increased tolerance to environmental stress and/or increased biomass production as compared to a corresponding, e.g. non-transformed, wild type plant, which comprises the following steps:
[0224] (a) reduction, repression or deletion of the activity of
   [0225] (I) at least one polypeptide comprising a polypeptide selected from the group consisting of SEQ ID NOs 28, 61, 95, 133, and 172 or a homologue thereof as depicted in column 7 of table II, application no. 1, preferably as depicted in table II B, application no. 1, or comprising, a consensus sequence or at least one polypeptide motif of table IV, application no. 1, or
   [0226] (II) at least one expression product of a nucleic acid molecule comprising a polynucleotide selected from the group consisting of SEQ ID NOs 27, 60, 94, 132, and 171 or a homologue thereof as depicted in column 7 of table I, application no. 1, preferably as depicted in in column 5 or 7 of table I B, application no. 1,
   [0227] (III) or a functional equivalent of (I) or (II)
      in a plant or a part thereof; and
[0228] (b) generating a transformed plant with increased yield, in particular an increased yield-related trait, e.g. an increased nutrient use efficiency, such as an enhanced nitrogen use efficiency and/or increased tolerance to environmental stress and/or increased biomass increased yield, production as compared to a corresponding, e.g. non-transformed, wild type plant and growing under conditions which permit the development of the plant,
[0229] (c) under conditions of limited nitrogen supply, (d) selecting the plant increased yield, in particular an increased yield-related trait, e.g. an increased nutrient use efficiency, such as an enhanced nitrogen use efficiency and/or increased tolerance to environmental stress and/or increased biomass production, as compared to a corresponding, e.g. non-transformed, wild type plant, after the non-transformed wild type show visual symptoms of deficiency and/or death corresponding, e.g. non-transformed, wild type

[0230] Surprisingly, it was observed that a knock out of at least one gene conferring an activity selected from the group consisting of At1g74730-protein, At3g63270-protein, protein kinase, protein serine/threonine phosphatase, and SET domain-containing protein or of a gene comprising a nucleic acid sequence described in column 5 of table I, application no. 1, in Arabidopsis thaliana conferred an enhancement of NUE and/or increased biomass production in the transformed plants as compared to a corresponding, e.g. non-transformed, wild type plant.

[0231] In particular, it was observed that the knock out of a gene comprising the nucleic acid sequence SEQ ID NO. 27 in Arabidopsis thaliana conferred an increased yield, in particular an increased yield-related trait, e.g. an increased nutrient use efficiency, such as an enhanced nitrogen use efficiency and/or increased tolerance to environmental stress and/or increased biomass production, to the wild type control.

[0232] It was further observed that deleting, repressing or reducing the activity of a gene product with the activity of a “At1g74730-protein” encoded by a gene comprising the nucleic acid sequence SEQ ID NO. 27 in Arabidopsis thaliana conferred an enhanced yield, e.g. an NUE and/or an increased biomass production, especially an increased yield, in particular an increased yield-related trait, e.g. an increased nutrient use efficiency, such as an enhanced nitrogen use efficiency and/or increased tolerance to environmental stress and/or increased biomass compared with the wild type control.

[0233] In particular, it was observed that the knock out of a gene comprising the nucleic acid sequence SEQ ID NO. 60 in Arabidopsis thaliana conferred an increased yield, in particular an increased yield-related trait, e.g. an increased nutrient use efficiency, such as an enhanced nitrogen use efficiency and/or increased tolerance to environmental stress and/or increased biomass production, to the wild type control.

[0234] It was further observed that deleting, repressing or reducing the activity of a gene product with the activity of a “SET domain-containing protein” encoded by a gene comprising the nucleic acid sequence SEQ ID NO. 60 in Arabidopsis thaliana conferred an enhanced yield, e.g. an NUE and/or an increased biomass production, especially an increased yield, in particular an increased yield-related trait, e.g. an increased nutrient use efficiency, such as an enhanced nitrogen use efficiency and/or increased tolerance to environmental stress and/or increased biomass compared with the wild type control.

[0235] In particular, it was observed that the knock out of a gene comprising the nucleic acid sequence SEQ ID NO. 94 in Arabidopsis thaliana conferred an increased yield, in particular an increased yield-related trait, e.g. an increased nutrient use efficiency, such as an enhanced nitrogen use efficiency and/or increased tolerance to environmental stress and/or increased biomass production, to the wild type control.

[0236] It was further observed that deleting, repressing or reducing the activity of a gene product with the activity of a “At3g63270-protein” encoded by a gene comprising the nucleic acid sequence SEQ ID NO. 94 in Arabidopsis thaliana conferred an enhanced yield, e.g. an NUE and/or an increased biomass production, especially an increased yield, in particular an increased yield-related trait, e.g. an increased nutrient use efficiency, such as an enhanced nitrogen use efficiency and/or increased tolerance to environmental stress and/or increased biomass compared with the wild type control.

[0237] In particular, it was observed that the knock out of a gene comprising the nucleic acid sequence SEQ ID NO. 132 in Arabidopsis thaliana conferred an increased yield, in particular an increased yield-related trait, e.g. an increased nutrient use efficiency, such as an enhanced nitrogen use efficiency and/or increased tolerance to environmental stress and/or increased biomass production, to the wild type control.

[0238] It was further observed that deleting, repressing or reducing the activity of a gene product with the activity of a “protein serine/threonine phosphatase” encoded by a gene comprising the nucleic acid sequence SEQ ID NO. 132 in Arabidopsis thaliana conferred an enhanced yield, e.g. an NUE and/or an increased biomass production, especially an increased yield, in particular an increased yield-related trait, e.g. an increased nutrient use efficiency, such as an enhanced nitrogen use efficiency and/or increased tolerance to environmental stress and/or increased biomass compared with the wild type control.

[0239] In particular, it was observed that the knock out of a gene comprising the nucleic acid sequence SEQ ID NO. 171 in Arabidopsis thaliana conferred an increased yield, in particular an increased yield-related trait, e.g. an increased nutrient use efficiency, such as an enhanced nitrogen use efficiency and/or increased tolerance to environmental stress and/or increased biomass production, to the wild type control.

[0240] It was further observed that deleting, repressing or reducing the activity of a gene product with the activity of a “protein kinase” encoded by a gene comprising the nucleic acid sequence SEQ ID NO. 171 in Arabidopsis thaliana conferred an enhanced yield, e.g. an NUE and/or an increased biomass production, especially an increased yield, in particular an increased yield-related trait, e.g. an increased nutrient use efficiency, such as an enhanced nitrogen use efficiency and/or increased tolerance to environmental stress and/or increased biomass compared with the wild type control.

[0241] Thus, according to the method of the invention for an increased yield, in particular an increased yield-related trait, e.g. an increased nutrient use efficiency, such as an enhanced nitrogen use efficiency and/or increased tolerance to environmental stress and/or increased biomass increased yield, in particular an increased yield-related trait, e.g. an increased nutrient use efficiency, such as an enhanced nitrogen use efficiency and/or increased tolerance to environmental stress and/or increased biomass production in a plant cell, plant or a part thereof compared to a control or wild type can be achieved.

[0242] Accordingly, in one embodiment, in case the activity of the A. thaliana nucleic acid molecule or a polypeptide comprising the nucleic acid SEQ ID NO. 27 or polypeptide SEQ ID NO. 28, respectively is reduced or in case in an other organism the activity of the native homolog of said nucleic acid molecule or polypeptide is deleted, repressed or reduced, e.g. if the activity of a nucleic acid molecule or a polypeptide comprising the nucleic acid or polypeptide or the consensus sequence or the polypeptide motif, as depicted in table I, II or IV, column 7, application no. 1, in the respective same line as the nucleic acid molecule SEQ ID NO. 27 or polypeptide SEQ ID NO. 28, respectively is reduced or if the activity “At1g74730-protein” is reduced in a plant cell, a plant or a part thereof, preferably an increased yield, in particular an increased yield-related trait, e.g. an increased nutrient use efficiency, such as an enhanced nitrogen use efficiency and/or increased tolerance to environmental stress and/or increased biomass production compared with the wild type control is conferred in said plant cell, plant or part thereof, especially an enhanced NUE, or an increased biomass production, or an enhanced NUE and an increased biomass production.

[0243] An increased nutrient use efficiency as compared to a corresponding non-modified, e.g. a non-transformed, wild type plant is conferred if the activity of the A. thaliana nucleic acid molecule or a polypeptide comprising the nucleic acid SEQ ID NO. 27 or polypeptide SEQ ID NO. 28, respectively is reduced or in case in an other organism the activity of the native homolog of said nucleic acid molecule or polypeptide is deleted, repressed or reduced, e.g. if the activity of a nucleic acid molecule or a polypeptide comprising the nucleic acid or polypeptide or the consensus sequence or the polypeptide motif, as depicted in table I, II or IV, column 7, application no. 1, in the respective same line as the nucleic acid molecule SEQ ID NO. 27 or polypeptide SEQ ID NO. 28, respectively is reduced or if the activity “At1g74730-protein” is reduced in a plant cell, a plant or a part thereof. In one embodiment, an increased nitrogen use efficiency is conferred.

[0244] For example, an increase of yield from 1.05-fold to 1.20-fold, for example plus at least 100% thereof, under conditions of nitrogen deficiency is conferred compared to a corresponding non-modified, e.g. non-transformed, wild type plant.

[0245] Accordingly, in one embodiment, in case the activity of the A. thaliana nucleic acid molecule or a polypeptide comprising the nucleic acid SEQ ID NO. 60 or polypeptide SEQ ID NO. 61, respectively is reduced or in case in an other organism the activity of the native homolog of said nucleic acid molecule or polypeptide is deleted, repressed or reduced, e.g. if the activity of a nucleic acid molecule or a polypeptide comprising the nucleic acid or polypeptide or the consensus sequence or the polypeptide motif, as depicted in table I, II or IV, column 7, application no. 1, in the respective same line as the nucleic acid molecule SEQ ID NO. 60 or polypeptide SEQ ID NO. 61, respectively is reduced or if the activity “SET domain-containing protein” is reduced in a plant cell, a plant or a part thereof, preferably an increased yield, in particular an increased yield-related trait, e.g. an increased nutrient use efficiency, such as an enhanced nitrogen use efficiency and/or increased tolerance to environmental stress and/or increased biomass production compared with the wild type control is conferred in said plant cell, plant or part thereof, especially an enhanced NUE, or an increased biomass production, or an enhanced NUE and an increased biomass production.

[0246] In a further embodiment, an increased nutrient use efficiency as compared to a corresponding non-modified, e.g. a non-transformed, wild type plant cell, a plant or a part thereof is conferred if the activity of the A. thaliana nucleic acid molecule or a polypeptide comprising the nucleic acid SEQ ID NO. 60 or polypeptide SEQ ID NO. 61, respectively is reduced or in case in an other organism the activity of the native homolog of said nucleic acid molecule or polypeptide is deleted, repressed or reduced, e.g. if the activity of a nucleic acid molecule or a polypeptide comprising the nucleic acid or polypeptide or the consensus sequence or the polypeptide motif, as depicted in table I, II or IV, column 7, application no. 1, in the respective same line as the nucleic acid molecule SEQ ID NO. 60 or polypeptide SEQ ID NO. 61, respectively is reduced or if the activity “SET domain-containing protein” is reduced in a plant cell, a plant or a part thereof. In one embodiment, an increased nitrogen use efficiency is conferred.

[0247] For example, an increase of yield from 1.05-fold to 1.11-fold, for example plus at least 100% thereof, under conditions of nitrogen deficiency is conferred compared to a corresponding non-modified, e.g. non-transformed, wild type plant.

[0248] Accordingly, in one embodiment, in case the activity of the A. thaliana nucleic acid molecule or a polypeptide comprising the nucleic acid SEQ ID NO. 94 or polypeptide SEQ ID NO. 95, respectively is reduced or in case in an other organism the activity of the native homolog of said nucleic acid molecule or polypeptide is deleted, repressed or reduced, e.g. if the activity of a nucleic acid molecule or a polypeptide comprising the nucleic acid or polypeptide or the consensus sequence or the polypeptide motif, as depicted in table I, II or IV, column 7, application no. 1, in the respective same line as the nucleic acid molecule SEQ ID NO. 94 or polypeptide SEQ ID NO. 95, respectively is reduced or if the activity “At3g63270-protein” is reduced in a plant cell, a plant or a part thereof, preferably an increased yield, in particular an increased yield-related trait, e.g. an increased nutrient use efficiency, such as an enhanced nitrogen use efficiency and/or increased tolerance to environmental stress and/or increased biomass production compared with the wild type control is conferred in said plant cell, plant or part thereof, especially an enhanced NUE, or an increased biomass production, or an enhanced NUE and an increased biomass production.

[0249] In a further embodiment, an increased nutrient use efficiency as compared to a corresponding non-modified, e.g. a non-transformed, wild type plant cell, a plant or a part thereof is conferred if the activity of the A. thaliana nucleic acid molecule or a polypeptide comprising the nucleic acid SEQ ID NO. 94 or polypeptide SEQ ID NO. 95, respectively is reduced or in case in an other organism the activity of the native homolog of said nucleic acid molecule or polypeptide is deleted, repressed or reduced, e.g. if the activity of a nucleic acid molecule or a polypeptide comprising the nucleic acid or polypeptide or the consensus sequence or the polypeptide motif, as depicted in table I, II or IV, column 7, application no. 1, in the respective same line as the nucleic acid molecule SEQ ID NO. 94 or polypeptide SEQ ID NO. 95, respectively is reduced or if the activity “At3g63270-protein” is reduced in a plant cell, a plant or a part thereof. In one embodiment, an increased nitrogen use efficiency is conferred.

[0250] For example, an increase of yield from 1.05-fold to 1.23-fold, for example plus at least 100% thereof, under conditions of nitrogen deficiency is conferred compared to a corresponding non-modified, e.g. non-transformed, wild type plant.

[0251] Accordingly, in one embodiment, in case the activity of the A. thaliana nucleic acid molecule or a polypeptide comprising the nucleic acid SEQ ID NO. 132 or polypeptide SEQ ID NO. 133, respectively is reduced or in case in an other organism the activity of the native homolog of said nucleic acid molecule or polypeptide is deleted, repressed or reduced, e.g. if the activity of a nucleic acid molecule or a polypeptide comprising the nucleic acid or polypeptide or the consensus sequence or the polypeptide motif, as depicted in table I, II or IV, column 7, application no. 1, in the respective same line as the nucleic acid molecule SEQ ID NO. 132 or polypeptide SEQ ID NO. 133, respectively is reduced or if the activity “protein serine/threonine phosphatase” is reduced in a plant cell, a plant or a part thereof, preferably an increased yield, in particular an increased yield-related trait, e.g. an increased nutrient use efficiency, such as an enhanced nitrogen use efficiency and/or increased tolerance to environmental stress and/or increased biomass production compared with the wild type control is conferred in said plant cell, plant or part thereof, especially an enhanced NUE, or an increased biomass production, or an enhanced NUE and an increased biomass production.

[0252] In a further embodiment, an increased nutrient use efficiency as compared to a corresponding non-modified, e.g. a non-transformed, wild type plant cell, a plant or a part thereof is conferred if the activity of the A. thaliana nucleic acid molecule or a polypeptide comprising the nucleic acid SEQ ID NO. 132 or polypeptide SEQ ID NO. 133, respectively is reduced or in case in an other organism the activity of the native homolog of said nucleic acid molecule or polypeptide is deleted, repressed or reduced, e.g. if the activity of a nucleic acid molecule or a polypeptide comprising the nucleic acid or polypeptide or the consensus sequence or the polypeptide motif, as depicted in table I, II or IV, column 7, application no. 1, in the respective same line as the nucleic acid molecule SEQ ID NO. 132 or polypeptide SEQ ID NO. 133, respectively is reduced or if the activity “protein serine/threonine phosphatase” is reduced in a plant cell, a plant or a part thereof. In one embodiment, an increased nitrogen use efficiency is conferred.

[0253] For example, an increase of yield from 1.05-fold to 1.10-fold, for example plus at least 100% thereof, under conditions of nitrogen deficiency is conferred compared to a corresponding non-modified, e.g. non-transformed, wild type plant.

[0254] Accordingly, in one embodiment, in case the activity of the A. thaliana nucleic acid molecule or a polypeptide comprising the nucleic acid SEQ ID NO. 171 or polypeptide SEQ ID NO. 172, respectively is reduced or in case in an other organism the activity of the native homolog of said nucleic acid molecule or polypeptide is deleted, repressed or reduced, e.g. if the activity of a nucleic acid molecule or a polypeptide comprising the nucleic acid or polypeptide or the consensus sequence or the polypeptide motif, as depicted in table I, II or IV, column 7, application no. 1, in the respective same line as the nucleic acid molecule SEQ ID NO. 171 or polypeptide SEQ ID NO. 172, respectively is reduced or if the activity “protein kinase” is reduced in a plant cell, a plant or a part thereof, preferably an increased yield, in particular an increased yield-related trait, e.g. an increased nutrient use efficiency, such as an enhanced nitrogen use efficiency and/or increased tolerance to environmental stress and/or increased biomass production compared with the wild type control is conferred in said plant cell, plant or part thereof, especially an enhanced NUE, or an increased biomass production, or an enhanced NUE and an increased biomass production.

[0255] In a further embodiment, an increased nutrient use efficiency as compared to a corresponding non-modified, e.g. a non-transformed, wild type plant cell, a plant or a part thereof is conferred if the activity of the A. thaliana nucleic acid molecule or a polypeptide comprising the nucleic acid SEQ ID NO. 171 or polypeptide SEQ ID NO. 172, respectively is reduced or in case in an other organism the activity of the native homolog of said nucleic acid molecule or polypeptide is deleted, repressed or reduced, e.g. if the activity of a nucleic acid molecule or a polypeptide comprising the nucleic acid or polypeptide or the consensus sequence or the polypeptide motif, as depicted in table I, II or IV, column 7, application no. 1, in the respective same line as the nucleic acid molecule SEQ ID NO. 171 or polypeptide SEQ ID NO. 172, respectively is reduced or if the activity “protein kinase” is reduced in a plant cell, a plant or a part thereof. In one embodiment, an increased nitrogen use efficiency is conferred.

[0256] For example, an increase of yield from 1.05-fold to 1.30-fold, for example plus at least 100% thereof, under conditions of nitrogen deficiency is conferred compared to a corresponding non-modified, e.g. non-transformed, wild type plant.

[0257] In a further embodiment, an increased tolerance to abiotic environmental stress, in particular increased low temperature tolerance, compared to a corresponding non-modified, e.g. a non-transformed, wild type plant is conferred if the activity of the A. thaliana nucleic acid molecule or a polypeptide comprising the nucleic acid SEQ ID NO. 171 or polypeptide SEQ ID NO. 172, respectively is reduced or in case in an other organism the activity of the native homolog of said nucleic acid molecule or polypeptide is deleted, repressed or reduced, e.g. if the activity of a nucleic acid molecule or a polypeptide comprising the nucleic acid or polypeptide or the consensus sequence or the polypeptide motif, as depicted in table I, II or IV, column 7, application no. 1, in the respective same line as the nucleic acid molecule SEQ ID NO. 171 or polypeptide SEQ ID NO. 172, respectively is reduced or if the activity “protein kinase” is reduced in a plant cell, a plant or a part thereof.

[0258] For example, an increase of yield from 1.1-fold to 1.15-fold, or for example plus at least 20%, or at least 100% thereof, under conditions of low temperature is conferred compared to a corresponding non-modified, e.g. non-transformed, wild type plant.

[0259] In a further embodiment, an increased intrinsic yield as compared to a corresponding non-modified, e.g. a non-transformed, wild type plant cell, a plant or a part thereof is conferred, if the activity of the A. thaliana nucleic acid molecule or a polypeptide comprising the nucleic acid SEQ ID NO. 171 or polypeptide SEQ ID NO. 172, respectively is reduced or in case in an other organism the activity of the native homolog of said nucleic acid molecule or polypeptide is deleted, repressed or reduced, e.g. if the activity of a nucleic acid molecule or a polypeptide comprising the nucleic acid or polypeptide or the consensus sequence or the polypeptide motif, as depicted in table I, II or IV, column 7, application no. 1, in the respective same line as the nucleic acid molecule SEQ ID NO. 171 or polypeptide SEQ ID NO. 172, respectively is reduced or if the activity “protein kinase” is reduced in a plant cell, a plant or a part thereof.

[0260] In one embodiment an increased yield under standard conditions, e.g. in the absence of nutrient deficiency as well as stress conditions, is conferred. For example, an increase of yield from 1.05-fold to 1.19-fold, for example plus at least 20%, or at least 100% thereof, under standard conditions, e.g. in the absence of nutrient deficiency as well as stress conditions is conferred compared to a corresponding on-modified, e.g. non-transformed, wild type plant.

[0261] The ratios indicated above particularly refer to an increased yield actually measured as increase of biomass, especially as fresh weight biomass of aerial parts.

[0262] In one embodiment, the reduction or deletion of an activity conferred by a nucleic acid molecule indicated in Table Va or its homolog as indicated in Table I or the expression product of a gene comprising said nucleic acid molecule is used in the method of the present invention to increase nutrient use efficiency, e.g. to increased the nitrogen use efficiency, of the a plant compared with the wild type control.

[0263] In one embodiment, the reduction or deletion of an activity conferred by a nucleic acid molecule indicated in Table Vb or its homolog as indicated in Table I or the expression product of a gene comprising said nucleic acid molecule is used in the method of the present invention to increase stress tolerance, e.g. increase low temperature, of a plant compared with the wild type control.

### CHECK No CD Data Given

[0264] In one embodiment, the reduction or deletion of an activity conferred by a nucleic acid molecule indicated in Table Vd or its homolog as indicated in Table I or the expression product of a gene comprising said nucleic acid molecule is used in the method of the present invention to increase intrinsic yield, e.g. to increase yield under standard conditions, e.g. increase biomass under non-deficiency or non-stress conditions, of a plant compared with the wild type control.

[0265] For the purposes of the invention, as a rule the plural is intended to encompass the singular and vice versa.

[0266] Unless otherwise specified, the terms “polynucleotides”, “nucleic acid” and “nucleic acid molecule” are interchangeably in the present context. Unless otherwise specified, the terms “peptide”, “polypeptide” and “protein” are interchangeably in the present context.

[0267] The term “sequence” may relate to polynucleotides, nucleic acids, nucleic acid molecules, peptides, polypeptides and proteins, depending on the context in which the term “sequence” is used. The terms “gene(s)”, “polynucleotide”, “nucleic acid sequence”, “nucleotide sequence”, or “nucleic acid molecule(s)” as used herein refers to a polymeric form of nucleotides of any length, either ribonucleotides or deoxyribonucleotides. The terms refer only to the primary structure of the molecule.

[0268] Thus, the terms “gene(s)”, “polynucleotide”, “nucleic acid sequence”, “nucleotide sequence”, or “nucleic acid molecule(s)” as used herein include double- and single-stranded DNA and/or RNA. They also include known types of modifications, for example, methylation, “caps”, substitutions of one or more of the naturally occurring nucleotides with an analog. Preferably, the DNA or RNA sequence comprises a coding sequence encoding the herein defined polypeptide.

[0269] A “coding sequence” is a nucleotide sequence, which is transcribed into an RNA, e.g. a regulatory RNA, such as a miRNA, a ta-siRNA, cosuppression molecule, an RNAi, a ribozyme, etc. or into a mRNA which is translated into a polypeptide when placed under the control of appropriate regulatory sequences. The boundaries of the coding sequence are determined by a translation start codon at the 5′-terminus and a translation stop codon at the 3′-terminus. A coding sequence can include, but is not limited to mRNA, cDNA, recombinant nucleotide sequences or genomic DNA, while introns may be present as well under certain circumstances.

[0270] As used in the present context a nucleic acid molecule may also encompass the untranslated sequence located at the 3′ and at the 5′ end of the coding gene region, for example at least 500, preferably 200, especially preferably 100, nucleotides of the sequence upstream of the 5′ end of the coding region and at least 100, preferably 50, especially preferably 20, nucleotides of the sequence downstream of the 3′ end of the coding gene region. In the event for example the antisense, RNAi, snRNA, dsRNA, siRNA, miRNA, ta-siRNA, cosuppression molecule, ribozyme etc. technology is used coding regions as well as the 5′- and/or 3′-regions can advantageously be used.

[0271] However, it is often advantageous only to choose the coding region for cloning and expression purposes.

[0272] “Polypeptide” refers to a polymer of amino acid (amino acid sequence) and does not refer to a specific length of the molecule. Thus peptides and oligopeptides are included within the definition of polypeptide. This term does also refer to or include post-translational modifications of the polypeptide, for example, glycosylations, acetylations, phosphorylations and the like. Included within the definition are, for example, polypeptides containing one or more analogs of an amino acid (including, for example, unnatural amino acids, etc.), polypeptides with substituted linkages, as well as other modifications known in the art, both naturally occurring and non-naturally occurring.

[0273] The term “table I” used in this specification is to be taken to specify the content of table I A and table I B. The term “table II” used in this specification is to be taken to specify the content of table II A and table II B. The term “table I A” used in this specification is to be taken to specify the content of table I A. The term “table I B” used in this specification is to be taken to specify the content of table I B. The term “table II A” used in this specification is to be taken to specify the content of table II A. The term “table II B” used in this specification is to be taken to specify the content of table II B. In one preferred embodiment, the term “table I” means table I B. In one preferred embodiment, the term “table II” means table II B.

[0274] The terms “comprise” or “comprising” and grammatical variations thereof when used in this specification are to be taken to specify the presence of stated features, integers, steps or components or groups thereof, but not to preclude the presence or addition of one or more other features, integers, steps, components or groups thereof.

[0275] In accordance with the invention, the term “organism” as understood herein relates always to a non-human organism, in particular to a plant organism, the whole organism, tissues, organs or cell(s) thereof.

[0276] The triplets taa, tga and tag represent the (usual) stop codons which are interchangeable.

[0277] The terms “reduction”, “repression”, “decrease” or “deletion” relate to a corresponding change of a property in an organism, a part of an organism such as a tissue, seed, root, tuber, fruit, leave, flower etc. or in a cell. Under “change of a property” it is understood that the activity, expression level or amount of a gene product or a metabolite content is changed in a specific volume or in a specific amount of protein relative to a corresponding volume or amount of protein of a control, reference or wild type. Preferably, the overall activity in the volume is reduced, decreased or deleted in cases if the reduction, decrease or deletion is related to the reduction, decrease or deletion of an activity of a gene product, independent whether the amount of gene product or the specific activity of the gene product or both is reduced, decreased or deleted or whether the amount, stability or translation efficacy of the nucleic acid sequence or gene encoding for the gene product is reduced, decreased or deleted.

[0278] The terms “reduction”, “repression”, “decrease” or “deletion” include the change of said property in only parts of the subject of the present invention, for example, the modification can be found in compartment of a cell, like an organelle, or in a part of a plant, including but not limited to tissue, seed, root, leave, tuber, fruit, flower etc. but is not detectable if the overall subject, i.e. complete cell or plant, is tested. Preferably, the “reduction”, “repression”, “decrease” or “deletion” is found cellular, thus the term “reduction, decrease or deletion of an activity” or “reduction, decrease or deletion of a metabolite content” relates to the cellular reduction, decrease or deletion compared to the wild type cell. In addition the terms “reduction”, “repression”, “decrease” or “deletion” include the change of said property only during different growth phases of the organism used in the inventive process, for example the reduction, repression, decrease or deletion takes place only during the seed growth or during blooming. Furthermore the terms include a transitional reduction, decrease or deletion for example because the used method, e.g. the antisense, RNAi, snRNA, dsRNA, siRNA, miRNA, ta-siRNA, cosuppression molecule, or ribozyme, is not stable integrated in the genome of the organism or the reduction, decrease, repression or deletion is under control of a regulatory or inducible element, e.g. a chemical or otherwise inducible promoter, and has therefore only a transient effect.

[0279] Accordingly, the term “reduction”, “repression”, “decrease” or “deletion” means that the specific activity of a gene product, an enzyme or other protein or a regulatory RNA as well as the amount of a compound or metabolite, e.g. of a polypeptide, a nucleic acid molecule, or an encoding mRNA or DNA, can be reduced, decreased or deleted in a specific volume. The terms “reduction”, “repression”, “decrease” or “deletion” include that the reason for said “reduction”, “repression”, “decrease” or “deletion” could be a chemical compound that is administered to the organism or part thereof.

[0280] Throughout the specification a deletion of the activity or of the expression of an expression product, e.g. of a protein as depicted in table II means a total loss of the activity. The terms “reduction”, “repression”, or “decrease” are interchangeable. The term “reduction” shall include the terms “repression”, “decrease” or “deletion” if not otherwise specified.

[0281] The term “reducing”, “repressing”, “decreasing” or “deleting” as used herein also comprises the term “debasing”, “depleting”, diminishing” or “bringing down”.

[0282] Reduction is also understood as meaning the modification of the substrate specificity as can be expressed for example, by the kcat/Km value. In this context, the function or activity, e.g. the enzymatic activity or the “biological activity”, is reduced by at least 10%, advantageously 20%, preferably 30%, especially preferably 40%, 50% or 60%, very especially preferably 70%, 80%, 85% or 90% or more, very especially preferably are 95%, more preferably are 99% or more in comparison to the control, reference or wild type. Most preferably the reduction, decrease or deletion in activity amounts to essentially 100%. Thus, a particularly advantageous embodiment is the inactivation of the function of a compound, e.g. a polypeptide or a nucleic acid molecule.

[0283] The reduction, repression or deletion of the expression level or of the activity leads to an increased yield, in particular an increased yield-related trait, e.g. an increased nutrient use efficiency, such as an enhanced nitrogen use efficiency and/or increased tolerance to environmental stress and/or increased biomass production as compared to a corresponding, e.g. non-transformed, wild type plant of 10%, 20%, 30%, 40%, 50%, 100%, 150% or 200% or more, preferably of 250% or 300% or more, particularly preferably of 350% or 400% or more, most particularly preferably of 500% or 600% w/w, or more, expressed in the time the transgenic plant shows a increased yield, in particular an increased yield-related trait, e.g. an increased nutrient use efficiency, such as an enhanced nitrogen use efficiency and/or increased tolerance to environmental stress and/or increased biomassin comparison to the reference or wild type.

[0284] The term “activity” of a compound refers to the function of a compound in a biological system such as a cell, an organ or an organism. For example, the term “activity” of a compound refers to the enzymatic function, regulatory function or its function as binding partner, transporter, regulator, or carrier, etc of a compound.

[0285] In one embodiment, the term “biological activity” refers to an activity selected from the group consisting of

At1g74730-protein, At3g63270-protein, protein kinase, protein serine/threonine phosphatase, and SET domain-containing protein,
according to the corresponding context.

[0286] The terms “enhance”, “increase”, “decrease”, “repress” or “reduce” or similar terms include the change or the modulation of said property in only one or some parts as well as in all parts of the subject of the present invention. For example, the modification can be found in compartment of a cell, like an organelle, or preferably in a part of a plant, like a tissue, seed, root, leave, fruit, tuber, flower etc. but is not detectable if the overall subject, i.e. complete cell or plant, is tested.

[0287] More preferred is the finding that a change or a modulation of said property is found in more than one part of an organism, particularly of a plant.

[0288] Thus, in one embodiment, the change or the modulation of said property is found in a tissue, seed, root, fruit, tuber, leave and/or flower of a plant produced according to the process of the present invention.

[0289] However, the terms “enhance”, “increase”, “decrease”, “repress” or “reduce” or similar terms as used herein also include the change or modulation of said property in the whole organism as mentioned.

[0290] The terms “enhanced” or “increase” mean a 10%, 20%, 30%, 40% or 50% or higher, preferably at least a 60%, 70%, 80%, 90% or 100% or higher, more preferably 150%, 200%, 300%, 400% or 500% or higher increased yield, in particular an increased yield-related trait, e.g. an increased nutrient use efficiency, such as an enhanced nitrogen use efficiency and/or increased tolerance to environmental stress and/or increased biomass production as compared to a corresponding, e.g. non-transformed, wild type plant. In one embodiment, the increase is calculated as in the examples shown.

[0291] In one embodiment of the invention the enhanced NUE is determinated and quantified according to the following method:

Transformed plants are grown in pots in a growth chamber (Svalöf Weibull, Svalöv, Sweden). In case the plants are Arabidopsis thaliana seeds thereof are sown in pots containing a 1:1 (v:v) mixture of nutrient depleted soil (“Einheitserde Typ 0”, 30% clay, Tantau, Wansdorf Germany) and sand. Germination is induced by a four day period at 4° C., in the dark. Subsequently the plants are grown under standard growth conditions. In case the plants are Arabidopsis thaliana, the standard growth conditions are: photoperiod of 16 h light and 8 h dark, 20° C., 60% relative humidity, and a photon flux density of 200 μE. Plants are grown and cultured. In case the plants are Arabidopsis thaliana they are watered every second day with a N-depleted nutrient solution. The N-depleted nutrient solution e.g. contains beneath water μ

| mineral nutrient | final concentration | |
|---|---|---|
| KCl | 3.00 | mM |
| MgSO4 × 7H2O | 0.5 | mM |
| CaCl2 × 6H2O | 1.5 | mM |
| K2SO4 | 1.5 | mM |
| NaH2PO4 | 1.5 | mM |
| Fe-EDTA | 40 | μM |
| H₃BO₃ | 25 | μM |
| MnSO₄ × H₂O | 1 | μM |
| ZnSO₄ × 7H₂O | 0.5 | μM |
| Cu₂SO₄ × 5H₂O | 0.3 | μM |
| Na₂MoO₄ × 2H₂O | 0.05 | μM |

and no further N-containing salt.

[0292] After 9 to 10 days the plants are individualized . After a total time of 29 to 31 days the plants are harvested and rated by the fresh weight of the aerial parts of the plants, preferably the rossettes.

[0293] The term “reference”, “control” or “wild type” mean an organism without the aforementioned modification of the expression or activity of an expression product of a nucleic acid molecule comprising a polynucleotide indicated in able I, column 5 or 7 or of the activity of a protein having the activity of a polypeptide comprising a polypeptide indicated in table II or IV, column 5 or 7, or of the activity of a protein encoded by nucleic acid molecule comprising a nucleic acid molecule indicated in table I, column 5 or 7.

[0294] In other words wild type denotes (a) the organism which carries the unaltered (usually the “normal”) form of a gene or allele; (b) the laboratory stock from which mutants are derived. The adjective “wild-type” may refer to the phenotype or genotype.

[0295] A “reference”, “control” or “wild type” is in particular a cell, a tissue, an organ, a plant, or a part thereof, which was not produced according to the process of the invention.

[0296] Accordingly, the terms “wild type”, “control” or “reference” are exchangeable and can be a cell or a part of organisms such as an organelle or tissue, or an organism, in particular a plant, which was not modified or treated according to the herein described process according to the invention. Accordingly, the cell or a part of organisms such as an organelle or a tissue, or an organism, in particular a plant used as wild type, control or reference corresponds to the cell, organism or part thereof as much as possible and is in any other property but in the result of the process of the invention as identical to the subject matter of the invention as possible. Thus, the wild type, control or reference is treated identically or as identical as possible, saying that only conditions or properties might be different which do not influence the quality of the tested property.

[0297] Preferably, any comparison is carried out under analogous conditions. The term “analogous conditions” means that all conditions such as, for example, culture or growing conditions, assay conditions (such as buffer composition, temperature, substrates, pathogen strain, concentrations and the like) are kept identical between the experiments to be compared.

[0298] The “reference”, “control”, or “wild type” is preferably a subject, e.g. an organelle, a cell, a tissue, an organism, in particular a plant, which was not modified or treated according to the herein described process of the invention and is in any other property as similar to the subject matter of the invention as possible. The reference, control or wild type is in its genome, transcriptome, proteome or metabolome as similar as possible to the subject of the present invention. Preferably, the term “reference-” “control-” or “wild type-”-organelle, -cell, -tissue or -organism, in particular plant, relates to an organelle, cell, tissue or organism, in particular plant, which is nearly genetically identical to the organelle, cell, tissue or organism, in particular plant, of the present invention or a part thereof preferably 95%, more preferred are 98%, even more preferred are 99.00%, in particular 99.10%, 99.30%, 99.50%, 99.70%, 99.90%, 99.99%, 99.999% or more. Most preferable the “reference”, “control”, or “wild type” is preferably a subject, e.g. an organelle, a cell, a tissue, an organism, which is genetically identical to the organism, cell organelle used according to the process of the invention except that nucleic acid molecules or the gene product encoded by them are changed or modified according to the inventive process.

[0299] In case, a control, reference or wild type differing from the subject of the present invention only by not being subject of the process of the invention can not be provided, a control, reference or wild type can be an organism in which the cause for the modulation of the activity conferring increased yield, in particular an increased yield-related trait, e.g. an increased nutrient use efficiency, such as an enhanced nitrogen use efficiency and/or increased tolerance to environmental stress and/or increased biomass production as described herein has been switched back or off, e.g. by complementation of responsible reduced gene product, e.g. by stable or transient (over)expression, by activation of an activator or agonist, by inactivation of an inhibitor or antagonist, by adding active compounds as e.g. hormones, by introducing enhancers etc.

[0300] Accordingly, preferred reference subject is the starting subject of the present process of the invention.

[0301] Preferably, the reference and the subject matter of the invention are compared after standardization and normalization, e.g. to the amount of total RNA, DNA, or protein or activity or expression of reference genes, like housekeeping genes, such as certain actin or ubiquitin genes.

[0302] Preferably, the reference, control or wild type differs form the subject of the present invention only in the cellular activity of the polypeptide or RNA used in the process of the invention, e.g. as result of a reduction, decrease or deletion in the level of the nucleic acid molecule of the present invention or a reduction, decrease or deletion of the specific activity of the polypeptide or RNA used in the process of the invention, e.g. by the expression level or activity of protein or RNA, that means by reduction or inhibition of its biological activity and/or of its biochemical or genetical causes.

[0303] The term “expression” refers to the transcription and/or translation of a codogenic gene segment or gene. As a rule, the resulting product is a mRNA or a protein. However, expression products can also include functional RNAs such as, for example, antisense, tRNAs, snRNAs, rRNAs, dsRNAs, siRNAs, miRNAs, ta-siRNA, cosuppression molecules, ribozymes etc. Expression may be systemic, local or temporal, for example limited to certain cell types, tissues organs or time periods.

[0304] The term “expression” means the transcription of a gene into an RNA (e.g. rRNA, tRNA, miRNA, dsRNA, snRNA, ta-siRNA, sRNA) or messenger RNA (mRNA). Thus, term “expression” means the expression of a gene with or without the subsequent translation of the latter into a protein. Experimentally, expression on RNA level can be detected by methods well known, e.g. Northern blotting, array hybridizations, qRT PCR, transcriptional run-on assays. Further, experimentally, expression on polypeptide level can be detected by methods well known, e.g. Western blotting or other immuno assays.

[0305] The term “functional equivalent” of a polypeptide as depicted in column 5 or 7 of table II is a polypeptide which confers essentially the activity of a polypeptide as depicted in column 5 table II.

[0306] The term “functional equivalent” of a nucleic acid molecule as depicted in column 5 or 7 of table I is a polynucleotide which confers essentially the activity of a nucleic acid molecule as depicted in column 5 of table I.

[0307] In accordance with the invention, a protein or polypeptide has the activity of a polypeptide as depicted in column 5 of table II if the reduction, repression, decrease or deletion of its activity mediates the increased yield, in particular an increased yield-related trait, e.g. an increased nutrient use efficiency, such as an enhanced nitrogen use efficiency and/or increased tolerance to environmental stress and/or increased biomass production as compared to a corresponding, e.g. non-transformed, wild type plant.

[0308] In particular, a protein or polypeptide has the activity of a polypeptide as depicted in column 5 of table II if the reduction, repression, decrease or deletion of its activity mediates the increased yield, in particular an increased yield-related trait, e.g. an increased nutrient use efficiency, such as an enhanced nitrogen use efficiency and/or increased tolerance to environmental stress and/or increased biomass production as compared to a corresponding, e.g. non-transformed, wild type plant.

[0309] In accordance with the invention, a nucleic acid molecule or polynucleotide has the activity of a nucleic acid molecule as depicted in column 5 of table I if the reduction, repression, decrease or deletion of its expression mediates the increased yield, in particular an increased yield-related trait, e.g. an increased nutrient use efficiency, such as an enhanced nitrogen use efficiency and/or increased tolerance to environmental stress and/or increased biomass production as compared to a corresponding, e.g. non-transformed, wild type plant.

[0310] That means for example that the reduction, repression or deletion of an expression, like the expression of a gene product, or of an activity like an enzymatic activity, is somehow related to the increased yield, in particular an increased yield-related trait, e.g. an increased nutrient use efficiency, such as an enhanced nitrogen use efficiency and/or increased tolerance to environmental stress and/or increased biomass production as compared to a corresponding, e.g. non-transformed, wild type plant.

[0311] Throughout the specification the reduction, repression or deletion of the activity of such an aforementioned protein or polypeptide or of the expression product of such an aforementioned nucleic acid molecule or sequence means a reduction of the translation, transcription or expression level or activity of the gene product or the polypeptide, for example the enzymatic or biological activity of the polypeptide, of at least 10% preferably 20%, 30%, 40% or 50%, particularly preferably 60% 70% or 80%, most particularly preferably 90%, 91%, 92%, 93%, 94%, 95%, 96%, 97%, 98% or 99% in comparison to the original endogenous expression level of the expression product or to the original endogenous activity of an expression product or polypeptide comprising or being encoded by a nucleic acid molecule as indicated in column 5 or 7 of table I or comprising a polypeptide as indicated in column 5 or 7 of table II or IV or the endogenous homologue or equivalent thereof.

[0312] Further, the person skilled in the art can determine whether a polypeptide has the “activity of a polypeptide as depicted in column 5 of table II” in a complementation assay.

[0313] Further, the person skilled in the art can determine whether a nucleic acid molecule has the “activity of a nucleic acid molecule as depicted in column 5 of table I” in a complementation assay.

[0314] The specific activity of a polypeptide or a nucleic acid molecule as described herein for use in the process of the present invention can be tested as described in the examples or in the state of the art. In particular, determination whether the expression of a polynucleotide or a polypeptide in question is reduced, decreased or deleted in a plant cell and the detection of an increased yield, in particular an increased yield-related trait, e.g. an increased nutrient use efficiency, such as an enhanced nitrogen use efficiency and/or increased tolerance to environmental stress and/or increased biomass production as compared to a corresponding, e.g. non-transformed, wild type plant is an easy test and can be performed as described in the examples or in the state of the art.

[0315] In order to test whether a nucleic acid molecule, e.g. a gene, is a functional homologue of a nucleic acid molecule depicted in columns 5 or 7, in particular depicted in column 5, a complementation assay in a microorganism or a plant can be performed. For example, a plant lacking the activity of the gene, e.g. a Arabidopsis thaliana strain in which a nucleic acid molecule comprising the nucleic acid molecule has been knocked out, in particular deleted or interrupted, can be transformed with the respective nucleic acid molecule in question, e.g. a gene or homologue, under control of a suitable promoter, e.g. in a suitable vector. The promoter may either confer constitutive or transient or tissue or development specific or inducible expression. Preferably the promoter may be similar or identical in spatial and temporal activity to the promoter of the gene, which has been knock out, deleted or interrupted. The nucleic acid molecule in question, e.g. the gene or the homologue to be tested preferably comprises the complete coding region either with or without introns(s). In addition, it might be preferable to add 5′ and 3′ UTR or other features to the sequence in order to increase stability or translation of the transcript.

[0316] Transformed plants are analyzed for the presence of the respective construct and the expression of the nucleic acid molecule in question, e.g. the gene or homologue, or its expression product. Plants exhibiting expression of the gene or homologue are compared to wild type plants. The transgenic plant, comprising a knockout mutation and expressing the respective gene or homologue is essentially identical to wild type controls with regard to the change in the enhancement of NUE and/or increase in biomass production as compared to a corresponding, e.g. non-transformed, wild type plant.

[0317] A qualified complementation assay is for example described in Iba K., Journal of Biological Chemistry 268 (32), 24099 (1993), Bonaventure G. et al., Plant Growth. Plant Cell 15, 1020 (2003), or in Gachotte D. et al., Plant Journal 8 (3), 407 (1995).

[0318] The sequence of At1g74730 from Arabidopsis thaliana, e.g. as shown in column 5 of table I, application no. 1, has been published in the TAIR database http://www.arabidopsis.org (Huala, E. et al., Nucleic Acids Res. 29 (1), 102 (2001)), and its activity is described as At1g74730-protein.

[0319] Accordingly, in one embodiment, the process of the present invention comprises the reduction or repression of a gene product with the activity of a “At1g74730-protein” from Arabidopsis thaliana or its functional equivalent or its homolog, e.g. the reduction of
[0320] (a) a gene product of a gene comprising the nucleic acid molecule as shown in column 5 of table I, application no. 1, and being depicted in the same respective line as said At1g74730 or a functional equivalent or a homologue thereof as depicted in column 7 of table I, application no. 1, preferably a homologue or functional equivalent as depicted in column 7 of table I B, application no. 1, and being depicted in the same respective line as said At1g74730; or
[0321] (b) a polypeptide comprising a polypeptide, a consensus sequence or a polypeptide motif as depicted in column 5 of table II, application no. 1, and being depicted in the same respective line as said At1g74730 or a functional equivalent or a homologue thereof as depicted in column 7 of table II or IV, application no. 1, preferably a homologue or functional equivalent as depicted in column 7 of table II B, application no. 1, and being depicted in the same respective line as said At1g74730,
   as mentioned herein, for the increased yield, in particular an increased yield-related trait, e.g. an increased nutrient use efficiency, such as an enhanced nitrogen use efficiency and/or increased tolerance to environmental stress and/or increased biomass production as compared to a corresponding, e.g. non-transformed, wild type plant.

[0322] Accordingly, in one embodiment, the molecule which activity is to be reduced or repressed in the process of the invention is the gene product with an activity described as “At1g74730-protein”, preferably it is the molecule of section (a) or (b) of this paragraph [0032.1.1.1].

[0323] The sequence of At3g07670 from Arabidopsis thaliana, e.g. as shown in column 5 of table I, application no. 1, has been published in the TAIR database http://www.arabidopsis.org (Huala, E. et al., Nucleic Acids Res. 29 (1), 102 (2001)), and its activity is described as SET domain-containing protein.

[0324] Accordingly, in one embodiment, the process of the present invention comprises the reduction or repression of a gene product with the activity of a “SET domain-containing protein” from Arabidopsis thaliana or its functional equivalent or its homolog, e.g. the reduction of
[0325] (a) a gene product of a gene comprising the nucleic acid molecule as shown in column 5 of table I, application no. 1, and being depicted in the same respective line as said At3g07670 or a functional equivalent or a homologue thereof as depicted in column 7 of table I, application no. 1, preferably a homologue or functional equivalent as depicted in column 7 of table I B, application no. 1, and being depicted in the same respective line as said At3g07670; or
[0326] (b) a polypeptide comprising a polypeptide, a consensus sequence or a polypeptide motif as depicted in column 5 of table II, application no. 1, and being depicted in the same respective line as said At3g07670 or a functional equivalent or a homologue thereof as depicted in column 7 of table II or IV, application no. 1, preferably a homologue or functional equivalent as depicted in column 7 of table II B, application no. 1, and being depicted in the same respective line as said At3g07670,
   as mentioned herein, for the increased yield, in particular an increased yield-related trait, e.g. an increased nutrient use efficiency, such as an enhanced nitrogen use efficiency and/or increased tolerance to environmental stress and/or increased biomass production as compared to a corresponding, e.g. non-transformed, wild type plant.

[0327] Accordingly, in one embodiment, the molecule which activity is to be reduced or repressed in the process of the invention is the gene product with an activity described as “SET domain-containing protein”, preferably it is the molecule of section (a) or (b) of this paragraph [0032.1.1.1].

[0328] The sequence of At3g63270 from Arabidopsis thaliana, e.g. as shown in column 5 of table I, application no. 1, has been published in the TAIR database http://www.arabidopsis.org (Huala, E. et al., Nucleic Acids Res. 29 (1), 102 (2001)), and its activity is described as At3g63270-protein.

[0329] Accordingly, in one embodiment, the process of the present invention comprises the reduction or repression of a gene product with the activity of a “At3g63270-protein” from Arabidopsis thaliana or its functional equivalent or its homolog, e.g. the reduction of
[0330] (a) a gene product of a gene comprising the nucleic acid molecule as shown in column 5 of table I, application no. 1, and being depicted in the same respective line as said At3g63270 or a functional equivalent or a homologue thereof as depicted in column 7 of table I, application no. 1, preferably a homologue or functional equivalent as depicted in column 7 of table I B, application no. 1, and being depicted in the same respective line as said At3g63270; or
[0331] (b) a polypeptide comprising a polypeptide, a consensus sequence or a polypeptide motif as depicted in column 5 of table II, application no. 1, and being depicted in the same respective line as said At3g63270 or a functional equivalent or a homologue thereof as depicted in column 7 of table II or IV, application no. 1, preferably a homologue or functional equivalent as depicted in column 7 of table II B, application no. 1, and being depicted in the same respective line as said At3g63270,
   as mentioned herein, for the increased yield, in particular an increased yield-related trait, e.g. an increased nutrient use efficiency, such as an enhanced nitrogen use efficiency and/or increased tolerance to environmental stress and/or increased biomass production as compared to a corresponding, e.g. non-transformed, wild type plant.

[0332] Accordingly, in one embodiment, the molecule which activity is to be reduced or repressed in the process of the invention is the gene product with an activity described as “At3g63270-protein”, preferably it is the molecule of section (a) or (b) of this paragraph [0032.1.1.1]. The sequence of At4g03080 from Arabidopsis thaliana, e.g. as shown in column 5 of table I, application no. 1, has been published in the TAIR database http://www.arabidopsis.org (Huala, E. et al., Nucleic Acids Res. 29 (1), 102 (2001)), and its activity is described as protein serine/threonine phosphatase.

[0333] Accordingly, in one embodiment, the process of the present invention comprises the reduction or repression of a gene product with the activity of a “protein serine/threonine phosphatase” from Arabidopsis thaliana or its functional equivalent or its homolog, e.g. the reduction of
[0334] (a) a gene product of a gene comprising the nucleic acid molecule as shown in column 5 of table I, application no. 1, and being depicted in the same respective line as said At4g03080 or a functional equivalent or a homologue thereof as depicted in column 7 of table I, application no. 1, preferably a homologue or functional equivalent as depicted in column 7 of table I B, application no. 1, and being depicted in the same respective line as said At4g03080; or
[0335] (b) a polypeptide comprising a polypeptide, a consensus sequence or a polypeptide motif as depicted in column 5 of table II, application no. 1, and being depicted in the same respective line as said At4g03080 or a functional equivalent or a homologue thereof as depicted in column 7 of table II or IV, application no. 1, preferably a homologue or functional equivalent as depicted in column 7 of table II B, application no. 1, and being depicted in the same respective line as said At4g03080,
   as mentioned herein, for the increased yield, in particular an increased yield-related trait, e.g. an increased nutrient use efficiency, such as an enhanced nitrogen use efficiency and/or increased tolerance to environmental stress and/or increased biomass production as compared to a corresponding, e.g. non-transformed, wild type plant.

[0336] Accordingly, in one embodiment, the molecule which activity is to be reduced or repressed in the process of the invention is the gene product with an activity described as “protein serine/threonine phosphatase”, preferably it is the molecule of section (a) or (b) of this paragraph [0032.1.1.1].

[0337] The sequence of At5g65240 from Arabidopsis thaliana, e.g. as shown in column 5 of table I, application no. 1, has been published in the TAIR database http://www.arabidopsis.org (Huala, E. et al., Nucleic Acids Res. 29 (1), 102 (2001)), and its activity is described as protein kinase.

[0338] Accordingly, in one embodiment, the process of the present invention comprises the reduction or repression of a gene product with the activity of a “protein kinase” from Arabidopsis thaliana or its functional equivalent or its homolog, e.g. the reduction of
[0339] (a) a gene product of a gene comprising the nucleic acid molecule as shown in column 5 of table I, application no. 1, and being depicted in the same respective line as said At5g65240 or a functional equivalent or a homologue thereof as depicted in column 7 of table I, application no. 1, preferably a homologue or functional equivalent as depicted in column 7 of table I B, application no. 1, and being depicted in the same respective line as said At5g65240; or
[0340] (b) a polypeptide comprising a polypeptide, a consensus sequence or a polypeptide motif as depicted in column 5 of table II, application no. 1, and being depicted in the same respective line as said At5g65240 or a functional equivalent or a homologue thereof as depicted in column 7 of table II or IV, application no. 1, preferably a homologue or functional equivalent as depicted in column 7 of table II B, application no. 1, and being depicted in the same respective line as said At5g65240,
   as mentioned herein, for the increased yield, in particular an increased yield-related trait, e.g. an increased nutrient use efficiency, such as an enhanced nitrogen use efficiency and/or increased tolerance to environmental stress and/or increased biomass production as compared to a corresponding, e.g. non-transformed, wild type plant.

[0341] Accordingly, in one embodiment, the molecule which activity is to be reduced or repressed in the process of the invention is the gene product with an activity described as “protein kinase”, preferably it is the molecule of section (a) or (b) of this paragraph [0032.1.1.1].

[0342] Homologues (=homologs) of the present gene products, in particular homologues of a gene product which is encoded by or which is comprising a nucleic acid molecule as shown in column 7 of table I, application no. 1, or a polypeptide comprising the polypeptide, a consensus sequence or a polypeptide motif as shown in column 7 of table II or IV, application no. 1, can be derived from any organisms as long as the homologue confers the herein mentioned activity, i.e. it is a functional equivalent of said molecules. In particular, the homologue confers an increased yield, in particular an increased yield-related trait, e.g. an increased nutrient use efficiency, such as an enhanced nitrogen use efficiency and/or increased tolerance to environmental stress and/or increased biomass production as compared to a corresponding, e.g. non-transformed, wild type plant after its reduction, repression and/or deletion.

[0343] Further, according to the present invention, the term “homologue” relates to the sequence of an organism having preferably the highest or essentially the highest sequence homology to the herein mentioned or listed sequences of all expressed sequences of said organism.

[0344] The person skilled in the art knows how to find, identify and confirm, that, preferably, a putative homologue has said “yield increasing activity”, “stress tolerance increasing activity, “enhancement of NUE activity and/or “biomass production increasing activity”, e.g. as described herein. If known, the biological function or activity in an organism essentially relates or corresponds to the activity or function as described for the genes mentioned in paragraph [0032.1.1.1], for example to at least one of the protein(s) indicated in table II, column 5, application no. 1.

[0345] Accordingly, in one embodiment, the homologue or the functional equivalent comprises the sequence of a polypeptide encoded by a nucleic acid molecule comprising a sequence indicated in table I, column 7, application no. 1, or a polypeptide sequence, a consensus sequence or a polypeptide motif indicated in table II or IV, column 7, application no. 1, or it is the expression product of a nucleic acid molecule comprising a polynucleotide indicated in table I, column 7, application no. 1.

[0346] The herein disclosed information about sequence, activity, consensus sequence, polypeptide motifs and tests leads the person skilled in the art to the respective homologous or functional equivalent expression product in an organism.

[0347] In one embodiment, throughout the specification the activity of a protein or polypeptide or a nucleic acid molecule or sequence encoding such protein or polypeptide, e.g. an activity selected from the group consisting of At1g74730-protein, At3g63270-protein, protein kinase, protein serine/threonine phosphatase, or SET domain-containing protein, is an identical or similar activity according to the present invention if it has essentially the same activity or it has at least 10% of the original enzymatic or biological activity, preferably at least 20%, 30%, 40%, 50%, particularly preferably 60%, 70%, 80% most particularly preferably 90%, 95%, 98%, 99% of the activity in comparison to a protein as shown in table II, column 5 or 7, application no. 1, more preferably as shown in table II, column 5, application no. 1.

[0348] In one embodiment, the homolog of any one of the polypeptides indicated in table II, column 5, application no. 1, is derived from an Eukaryote and has a sequence identity of at least 50% and preferably has essentially the same or a similar activity as described in [0032.1.1.1], however its reduction, repression or deletion of expression or activity confers an increased yield, in particular an increased yield-related trait, e.g. an increased nutrient use efficiency, such as an enhanced nitrogen use efficiency and/or increased tolerance to environmental stress and/or increased biomass production as compared to a corresponding, e.g. non-transformed, wild type plant, respectively, in the organisms or a part thereof.

[0349] In one embodiment, the homolog of any one of the polypeptides indicated in Table II, column 5, application no. 1, is derived from a plant, preferably from a plant selected from the group consisting of Nacardiaceae, Asteraceae, Apiaceae, Betulaceae, Boraginaceae, Brassicaceae, Bromeliaceae, Caricaceae, Cannabaceae, Convolvulaceae, Chenopodiaceae, Cucurbitaceae, Elaeagnaceae, Ericaceae, Euphorbiaceae, Fabaceae, Geraniaceae, Gramineae, Juglandaceae, Lauraceae, Leguminosae, Linaceae, perennial grass, fodder crops, vegetables and ornamentals and has a sequence identity of at least 50% and preferably has essentially the same or a essentially similar activity as described in [0032.1.1.1], however at least its reduction of expression or activity confers an increased yield, in particular an increased yield-related trait, e.g. an increased nutrient use efficiency, such as an enhanced nitrogen use efficiency and/or increased tolerance to environmental stress and/or increased biomass production as compared to a corresponding, e.g. non-transformed, wild type plant.

[0350] In one embodiment, the homolog of any one of the polypeptides indicated in Table II, column 5, application no. 1, is derived from a crop plant and has a sequence identity of at least 30% and preferably has essentially the same or a similar activity as described in [0032.1.1.1], however at least an reduction of expression or activity confers an increased yield, in particular an increased yield-related trait, e.g. an increased nutrient use efficiency, such as an enhanced nitrogen use efficiency and/or increased tolerance to environmental stress and/or increased biomass production as compared to a corresponding, e.g. non-transformed, wild type plant.

[0351] Accordingly, in one embodiment, the molecule which activity is to be reduced in the process of the invention is the molecule of (a) or (b) of paragraph [0032.1.1.1], [0033.1.1.1] or of paragraph [00035.1. 1.1].

[0352] Thus, a homolog or a functional equivalent of a polypeptide as indicated in table II, column 3 or column 5, application no. 1, may be a polypeptide encoded by a nucleic acid molecule comprising a polynucleotide as indicated in table I, column 7, application no. 1, in the same line, or may be a polypeptide comprising a polypeptide indicated in table II, column 7, application no. 1, or one or more polypeptide motifs indicated in table IV, column 7, application no. 1, or the consensus sequence as indicated in table IV, column 7, application no. 1, in the same line as the polypeptide indicated in table II, column 3 or column 5, application no. 1.

[0353] Thus, a homolog or a functional equivalent of a nucleic acid molecule as indicated in table I, column 5, application no. 1, may be a nucleic acid molecule encoding a polypeptide comprising a polynucleotide as indicated in table I, column 7, application no. 1, in the same line, or nucleic acid molecule encoding a polypeptide comprising a polypeptide indicated in table II, column 7, application no. 1, or the consensus sequence or polypeptide motifs indicated in table IV, column 7, application no. 1, in the same line as the nucleic acid molecule indicated in table I, column 3 or column 5, application no. 1.

[0354] Further homologs or functional equivalents of said polypeptide which activity is to be reduced in the process of the present invention are described herein below.

[0355] As consequence of the reduction, repression, decrease or deletion of the translation, transcription and/or expression, e.g. as consequence of the reduced, repressed, decreased or deleted transcription of a gene, in particular of a gene as described herein (e.g. comprising a nucleic acid molecule indicated in column 5 or 7 of table I, application no. 1), a related phenotypic trait appears such as the r increased yield, in particular an increased yield-related trait, e.g. an increased nutrient use efficiency, such as an enhanced nitrogen use efficiency and/or increased tolerance to environmental stress and/or increased biomass production as compared to a corresponding, e.g. non-transformed, wild type plant.

[0356] A decreased, repressed or reduced activity of the molecule which activity is to be reduced in the process of the invention manifests itself in an increased yield, in particular an increased yield-related trait, e.g. an increased nutrient use efficiency, such as an enhanced nitrogen use efficiency and/or increased tolerance to environmental stress and/or increased biomass production as compared to a corresponding, e.g. non-transformed, wild type plant.

[0357] In one embodiment, in the process of the invention relates to process for increased yield, in particular an increased yield-related trait, e.g. an increased nutrient use efficiency, such as an enhanced nitrogen use efficiency and/or increased tolerance to environmental stress and/or increased biomass production in a plant as compared to a corresponding, e.g. non-transformed, wild type plant, the process comprises reducing, repressing or deleting the expression or activity of at least one nucleic acid molecule having or encoding a polypeptide having the activity of at least one protein encoded by the nucleic acid molecule as depicted in column 5 of Table I, application no. 1, and wherein the nucleic acid molecule comprises a nucleic acid molecule selected from the group consisting of:
[0358] (a) an isolated nucleic acid molecule encoding the polypeptide as depicted in column 5 or 7 of Table II, application no. 1, or containing a consensus sequence as depicted in column 7 of table IV, application no. 1;
[0359] (b) an isolated nucleic acid molecule as depicted in column 5 or 7 of Table I, application no. 1,
[0360] (c) an isolated nucleic acid sequence, which, as a result of the degeneracy of the genetic code, can be derived from a polypeptide sequence as depicted in column 5 or 7 of Table II, application no. 1, or from a polypeptide containing a consensus sequence as depicted in column 7 of table IV, application no. 1;
[0361] (d) an isolated nucleic acid molecule having at least 30%, 40%, 50%, 60%, 70%, 75%, 80%, 85%, 90%, 95%, 96%. 97%, 98%, 99%, 99.5% or 99.9% identity with the nucleic acid molecule sequence of a polynucleotide comprising the nucleic acid molecule as depicted in column 5 or 7 of table I, application no. 1;
[0362] (e) an isolated nucleic acid molecule encoding a polypeptide having at least 30%, 40%, 50%, 60%, 70%, 75%, 80%, 85%, 90%, 95%, 96%, 97%, 98%, 99%, 99.5% or 99.9% identity with the amino acid sequence of the polypeptide encoded by the nucleic acid molecule of (a) to (c) and having the activity represented by a protein as depicted in column 5 of table II, application no. 1;
[0363] (f) an isolated nucleic acid molecule encoding a polypeptide which is isolated with the aid of monoclonal or polyclonal antibodies made against a polypeptide encoded by one of the nucleic acid molecules of (a) to (e) and having the activity represented by the protein as depicted in column 5 of table II, application no. 1;
[0364] (g) an isolated nucleic acid molecule encoding a polypeptide comprising the consensus sequence or one or more polypeptide motifs as depicted in the corresponding lane of column 7 of table IV, application no. 1, and preferably having the activity represented by a nucleic acid molecule encoding a polynucleotide as depicted in column 5 of table I, application no. 1;
[0365] (h) an isolated nucleic acid molecule which comprises a polynucleotide, which is obtained by amplifying a cDNA library or a genomic library using primers as depicted in column 7 of table III, application no. 1, and which primers do not start at their 5′-end with the nucleotides ATA; and preferably said isolated nucleic acid molecule encoding a polypeptide having the activity represented by a polypeptide encoded by a nucleic acid molecule comprising a polynucleotide as depicted in column 5 of table I, application no. 1,
[0366] (i) an isolated nucleic acid molecule encoding a polypeptide having the activity represented by the protein as depicted in column 5 of table II, application no. 1; and
[0367] (j) an isolated nucleic acid molecule which is obtainable by screening a suitable nucleic acid library under stringent hybridization conditions with a probe comprising a complementary sequence of a nucleic acid molecule of (a) or (b) or with a fragment thereof having at least 15, 17, 19, 20, 21, 22, 23, 24, 25 nt or more of a nucleic acid molecule complementary to a nucleic acid molecule sequence characterized in (a) to (d) and encoding a polypeptide having the activity represented by a protein as depicted in column 5 of Table II, application no. 1;
   or which comprises a sequence which is complementary thereto;
   or of a protein encoded by said nucleic acid molecules.

[0368] Accordingly, in one embodiment, the term “molecule which activity is to be reduced in the process of the invention” refers to above nucleic acid molecules comprising at least one of said nucleic acid molecules a) to j) according to this paragraph.

[0369] In one embodiment, said nucleic acid molecule or said polypeptide as depicted in column 5 or 7 of table I, II or IV, application no. 1, is a novel nucleic acid molecule or a novel polypeptide as depicted in column 5 or 7 of table I B or II B, application no. 1.

[0370] A series of mechanisms exists via which the molecule which activity is to be reduced in the process of the invention, e.g. a polypeptide or a nucleic acid molecule, in particular a nucleic acid molecule comprising the nucleic acid molecule as described in column 5 or 7 of table I, application no. 1, or a polypeptide comprising a polypeptide as described in column 5 or 7 of table II or IV, application no. 1, or a functional homolog of said nucleic acid molecule or polypeptide, can be manipulated to directly or indirectly affect the yield, in particular an yield-related trait, e.g. nutrient use efficiency, such as nitrogen use efficiency and/or tolerance to environmental stress and/or biomass and/or biomass production as compared to a corresponding, e.g. non-transformed, wild type plant.

[0371] For example, the molecule number or the specific activity of the polypeptide which activity is to be reduced in the process of the invention or processed by polypeptide which activity is to be reduced in the process of the invention or the molecule number processed by or expressed by the nucleic acid molecule which activity is to be reduced in the process of the invention may be reduced, decreased or deleted.

[0372] However, it is known to the person skilled in the art to reduce, decrease, repress, or delete the expression of a gene which is naturally present in the organisms can be achieved by several ways, for example by modifying the regulation of the gene, or by reducing or decreasing the stability of the mRNA or of the gene product encoded by the nucleic acid molecule which activity is to be reduced, repressed, decreased or deleted in the process of the invention, e.g. of a nucleic acid molecule comprising a polynucleotide as depicted in column 5 or 7 of table I, application no. 1.

[0373] The term “reduction” of a biological function refers, for example, to the quantitative reduction in a binding capacity or binding strength of a protein to a substrate in an organism, a tissue, a cell or a cell compartment in comparison with the wild type of the same genus and species to which this method has not been applied, under otherwise identical conditions (such as, for example, culture conditions, age of the plants and the like).

[0374] Binding partners for the protein can be identified in the manner with which the skilled worker is familiar, for example by the yeast 2-hybrid system.

[0375] This also applies analogously to the combined reduction, repression, decrease or deletion of the expression of a gene or gene product of the nucleic acid molecule described in column 5 or 7, table I, application no. 1, together with the manipulation of further activities.

[0376] In one embodiment, the reduction, repression, decrease, deletion or modulation according to this invention can be conferred by the (e.g. transgenic) expression of a antisense nucleic acid molecule, an RNAi, a snRNA, a dsRNA, a siRNA, a miRNA, a ta-siRNA, a cosuppression molecule, a ribozyme or of an antibody, an inhibitor or of an other molecule inhibiting the expression or activity of the expression product of the nucleic acid molecule which activity is to be reduced, decreased or deleted in the process of the invention. E.g. the reduction, repression, decrease, deletion or modulation according to this invention can be conferred by the (e.g. transgenic) expression of a nucleic acid molecule comprising a polynucleotide encoding antisense nucleic acid molecule, RNAi, snRNA, dsRNA, siRNA, miRNA, ta-siRNA, a cosuppression molecule, ribozyme or of an antibody Against the nucleic acid molecule or the polypeptide which activity is to be reduced in the process of the invention.

[0377] In a further embodiment, the reduction, repression, decrease, deletion or modulation according to this invention can be to a stable mutation in the corresponding endogenous gene encoding the nucleic acid molecule to be reduced, decreased or deleted in the process of the invention, e.g. of a nucleic acid molecule comprising a polynucleotide as depicted in column 5 or 7 of table I, application no. 1.

[0378] In another embodiment, the reduction, repression, decrease, deletion or modulation according to this invention can be a modulation of the expression or of the behaviour of a gene conferring the expression of the polypeptide to be reduced, decreased, repressed or deleted according to the process of the invention, e.g. of a polypeptide comprising a polypeptide, a consensus sequence or a polypeptide motif as depicted in column 5 or 7 of table II or IV, application no. 1.

[0379] Said expression may be constitutive, e.g. due to a stable, permanent, systemic, local or temporal expression, for example limited to certain cell types, tissues organs or time periods.

[0380] For example, the reduction, repression, decrease, deletion or modulation according to this invention can be transient, e.g. due to an transient transformation, a transiently active promoter or temporary addition of a modulator, such as an antagonist, inhibitor or inductor, e.g. after transformation with an inducible construct carrying the double-stranded RNA nucleic acid molecule (dsRNA), antisense, RNAi, snRNA, siRNA, miRNA, ta-siRNA, a cosuppression molecule, ribozyme, antibody etc. as described herein, for example under control of an inducible promoter combined with the application of a corresponding inducer, e.g. tetracycline or ecdysone.

[0381] The reduction, decrease or repression of the activity of the molecule which activity is reduced according to the process of the invention amounts preferably by at least 10%, preferably by at least 30% or at least 60%, especially preferably by at least 70%, 80%, 85%, 90% or more, very especially preferably are at least 95%, more preferably are at least 99% or more in comparison to the control, reference or wild type. Most preferably the reduction, decrease, repression or deletion in activity amounts to 100%.

[0382] Various strategies for reducing the quantity, the expression, the activity or the function of proteins encoded by the nucleic acids or the nucleic acid sequences themselves according to the invention are encompassed in accordance with the invention. The skilled worker will recognize that a series of different methods are available for influencing the quantity of a protein, the activity or the function in the desired manner.

[0383] Accordingly, in one embodiment, the process of the present invention comprises one or more of the following steps:
[0384] (i) inhibition, repression, inactivation or reduction of translation or transcription of,
[0385] (ii) destabilization of transcript stability or polypeptide stability of,
[0386] (iii) reduction of accumulation of,
[0387] (iv) inhibition, repression, inactivation or reduction of activity of transcript or polypeptide of, and/or
[0388] (v) reduction of the copy number of functional (e.g. expressed) genes of,
   a suitable compound, for example, of
[0389] (a) a protein enabling, mediating or controlling the expression of a protein encoded by the nucleic acid molecule which activity is reduced in the process of invention or of the polypeptide which activity is reduced in the process of the invention, e.g. of a polypeptide comprising a polypeptide, a consensus sequence or a polypeptide motif as depicted in column 5 or 7, of table II or IV, application no. 1, or being encoded by a nucleic acid molecule comprising a polynucleotide as depicted in column 5 or 7, of table I, application no. 1;
[0390] (b) a mRNA molecule enabling, mediating or controlling the expression of a protein to be reduced in the process of the invention or being encoded by the nucleic acid molecule which activity is reduced in the process of the invention, e.g. enabling, mediating or controlling the expression of a polypeptide comprising a polypeptide, a consensus sequence or a polypeptide motif as depicted in column 5 or 7, of table II or IV, application no. 1, or of a polypeptide being encoded by a nucleic acid molecule comprising a polynucleotide as depicted in column 5 or 7, of table I, application no. 1,
[0391] (c) an RNA molecule enabling, mediating or controlling the expression of a mRNA encoding a polypeptide which activity is reduced in the process of the invention, e.g. of a mRNA encoding a polypeptide comprising a polypeptide, a consensus sequence or a polypeptide motif as depicted in column 5 or 7, of table II or IV, application no. 1, or of a mRNA comprising the nucleic acid molecule which activity is reduced in the process of the invention, e.g. comprising a polynucleotide as depicted in column 5 or 7, of table I, application no. 1;
[0392] (d) an RNA molecule enabling, mediating or controlling the expression of an expression product of a nucleic acid molecule comprising the polynucleotide which activity is reduced in the process of the invention; e.g. of a nucleic acid molecule comprising a polynucleotide as depicted in column 5 or 7, of table I, application no. 1;
[0393] (e) a mRNA encoding the polynucleotide or the polypeptide which activity is reduced in the process of the invention; e.g. of a nucleic acid molecule comprising a polynucleotide as depicted in column 5 or 7, of table I, application no. 1, or of a mRNA enabling, mediating or controlling the expression of a polypeptide which activity is reduced in the process of the invention, the polypeptide depicted in column 5 or 7, of table II or IV, application no. 1;
[0394] (f) a gene encoding an activator enabling the activation or increase of the expression of a nucleic acid molecule encoding a polypeptide encoded by the nucleic acid molecule which activity is reduced in the process of the invention or the polypeptide which activity is to be reduced in the process of the invention, e.g. a gene encoding an activator enabling the activation or increase of the expression of a polypeptide comprising a polypeptide, a consensus sequence or a polypeptide motif as depicted column 5 or 7, of table II or IV, application no. 1, or of a nucleic acid molecule comprising a polynucleotide as depicted in column 5 or 7, of table I, application no. 1; or
[0395] (g) an endogenous gene encoding the polypeptide or the nucleic acid molecule which activity is reduced in the process of the invention, for example an endogenous gene encoding a polypeptide comprising a polypeptide, a consensus sequence or a polypeptide motif as depicted column 5 or 7, of table II or IV, application no. 1, or a nucleic acid molecule comprising a polynucleotide as depicted in column 5 or 7, of table I, application no. 1.

[0396] Accordingly, the
[0397] i) inhibition, repression, inactivation or reduction of translation or transcription,
[0398] ii) destabilization transcript stability or polypeptide stability,
[0399] iii) reduction of accumulation,
[0400] iv) inhibition, repression, inactivation or reduction of activation of transcript or polypeptide, and/or
[0401] v) reducing the copy number of functional (e.g. expressed) genes,
   can for example be mediated e.g. by adding or expressing an antisense molecule, cosuppression molecule, an antibody, ribozyme, siRNA, microRNA, ta-siRNA, a cosuppression molecule, or RNAi, by mutation or deletion of a gene sequence, expressing or improving the activity of a negative expression element or by other methods known to the person skilled in the art or mentioned herein. A polynucleotide, which activity is to be reduced in the process of the invention or one or more fragments thereof, can for example be expressed in antisense orientation. In another embodiment, a hairpin RNAi constructs is expressed. It is also advantageous to express simultaneously a sense and antisense RNA molecule of the nucleic acid molecule or polypeptide which activity is to be reduced in the process of the invention.

[0402] For example, in an embodiment of the present invention, the present invention relates to a process, wherein the number of functional (e.g. expressed) copies of a gene encoding the polynucleotide or nucleic acid molecule of the invention is decreased.

[0403] Further, the endogenous level of the polypeptide of the invention can for example be decreased by modifying the transcriptional or translational regulation or efficiency of the polypeptide.

[0404] Details are described later in the description or in the examples.

[0405] In one embodiment, the process of the present invention comprises for example one or more of the following steps
[0406] (a) stabilizing a protein conferring the decreased expression of a protein of the nucleic acid molecule or polypeptide which activity is reduced in the process of the invention;
[0407] (b) stabilizing a mRNA or functional RNA conferring the decreased expression of a of the nucleic acid molecule or polypeptide which activity is reduced in the process of the invention;
[0408] (c) increasing or stimulating the specific activity of a protein conferring the decreased expression of a of the nucleic acid molecule or polypeptide which activity is reduced in the process of the invention;
[0409] (d) decreasing the specific activity of a protein conferring the increased expression of a of the nucleic acid molecule or polypeptide which activity is reduced in the process of the invention;
[0410] (e) expressing a transgenic gene encoding a protein conferring the decreased expression of a nucleic acids molecule or polypeptide which activity is reduced in the process of the invention;
[0411] (f) generating or increasing the expression of an endogenous or artificial transcription factor repressing the expression of a protein conferring the increased expression of the nucleic acid molecule or polypeptide which activity is reduced in the process of the invention;
[0412] (g) generating or increasing the expression of an endogenous or artificial transcription factor mediating the expression of a protein conferring the decreased expression of the nucleic acid molecule or polypeptide which activity is reduced in the process of the invention;
[0413] (h) reducing, repressing or deleting the expression of an endogenous or artificial transcription factor repressing the expression of a protein conferring the decreased expression of the nucleic acid molecule or polypeptide which activity is reduced in the process of the invention;
[0414] (i) reducing, repressing or deleting the expression of an endogenous or artificial transcription factor mediating the expression of a protein conferring the increased expression of the nucleic acid molecule or polypeptide which activity is reduced in the process of the invention;
[0415] (j) increasing the number of functional copies or expression of a gene conferring the decreased expression of the nucleic acid molecule or polypeptide which activity is reduced in the process of the invention;
[0416] (k) increasing the activity of a repressor protein or a repressor RNA;
[0417] (l) Increasing the activity of a protein or RNA leading to a dominant negative phenotype of the protein which activity is reduced in the process of the invention;
[0418] (m) expression of an antibody or aptamer, which binds to the nucleic acid molecule which activity is to be reduced in the process of the invention or the protein which activity is reduced in the process of the invention and thereby reducing, decreasing or deleting its activity;
[0419] (n) expressing a repressor conferring the reduced, repressed, decreased or deleted expression of a protein encoded by the nucleic acid to be reduced in the process molecule of the invention or of the polypeptide which activity is reduced in the process of the invention, or increasing the inhibitory regulation of the polypeptide of the invention;
[0420] (o) reducing or deleting the expression of the nucleic acid molecule which activity is reduced in the process of the invention or the polypeptide which activity is reduced in the process of the invention by adding one or more exogenous repression factors such as a inhibiting chemical compound to the organism or its medium or its feed, e.g. to the organism's water supply; or
[0421] (p) modulating growth conditions of an organism in such a manner, that the expression or activity of a nucleic acid molecule encoding the protein which activity is reduced in the process of the invention or the protein itself is reduced, repressed, decreased or deleted. This can be achieved by e.g modulating light and/or nutrient conditions, which in terms modulated the expression of the gene or protein which activity is reduced in the process of the invention.

[0422] Others strategies and modifications and combinations of above strategies are well known to the person skilled in the art and are also embodiment of this invention. Above said can for example be achieved by adding positive expression or removing negative expression elements, e.g. homologous recombination can be used to either introduce positive or negative regulatory elements, like a 35S enhancer into a plant promoter, or to remove repressor elements from regulatory regions. Further gene conversion methods can be used to disrupt elements or to enhance the activity of repressor elements. Repressor elements can be randomly introduced in plants by T-DNA or transposon mutagenesis. Lines can be identified in which the repressor elements are integrated near to a gene encoding the nucleic acid molecule or polypeptide which activity is to be reduced in the process of the invention, the expression of which is thereby reduced, repressed or deleted. Furthermore mutations like point mutations can be introduced randomly by different mutagenesis methods and can be selected by specific methods such like TILLING (reviewed in Slade and Knauf, Transgenic Res., 14 (2), 109 (2005)).

[0423] For example, an increase of the activity of a protein or RNA leading to a dominant negative phenotype of the protein which activity is reduced in the process of the invention can be achieved through the expression of a nucleic acid molecule encoding a protein, which has lost its biological activity but which binds to another protein in a multimeric complex thereby decreasing, repressing or deleting the activity of said complex or which binds for example as a transcription factor to DNA and thereby decreasing or deleting the activity of the translated protein.

[0424] In general, the amount of mRNA, polynucleotide or nucleic acid molecule in a cell or a compartment of an organism correlates to the amount of encoded protein and thus with the overall activity of the encoded protein in said volume. Said correlation is not always linear, the activity in the volume is dependent on the stability of the molecules, the degradation of the molecules or the presence of activating or inhibiting co-factors. Further, product and educt inhibitions of enzymes are well known.

[0425] The activity of the abovementioned proteins and/or polypeptide encoded by the nucleic acid molecule to be reduced in the process of the present invention can be reduced, repressed, decreased or deleted in various ways.

[0426] For example, the activity in an organism or in a part thereof, like a cell, is reduced, repressed or decreased via reducing or decreasing the gene product number, e.g. by reducing, repressing or decreasing the expression rate, like mutating the natural promoter to a lower activity, or by reducing, repressing or decreasing the stability of the mRNA expressed, thus reducing, repressing or decreasing the translation rate, and/or reducing, repressing or decreasing the stability of the gene product, thus increasing the proteins decay. Further, the activity or turnover of enzymes or channels or carriers, transcription factors, and similar active proteins can be influenced in such a manner that a reduction of the reaction rate or a modification (reduction, repression, decrease or deletion) of the affinity to the substrate results, is reached.

[0427] A mutation in the catalytic centre of a polypeptide or nucleic acid molecule which activity is reduced in the process of the invention, e.g. of an enzyme or a catalytic or regulatory RNA, can modulate the turn over rate of the enzyme, e.g. a knock out of an essential amino acid can lead to a reduced or complete knock out of the activity of the enzyme, or the deletion of regulator binding sites can reduce a positive regulation.

[0428] The specific activity of an enzyme of the present invention can be decreased such that the turn over rate is decreased or the binding of a co-factor is reduced. Reducing the stability of the encoding mRNA or the protein can also decrease the activity of a gene product. The reduction of the activity is also under the scope of the term “reduced, repressed, decreased or deleted activity”. Besides this, advantageously the reduction of the activity in cis, e.g. mutating the promoter including other cis-regulatory elements, or the transcribed or coding parts of the gene, inhibition can also be achieved in trans, eg. by transfactors like chimeric transcription factor, ribozymes, antisense RNAs, dsRNAs or dominant negative protein versions, which interfere with various stages of expression, eg the transcription, the translation or the activity of the protein or protein complex itself. Also epigenetic mechanisms like DNA modifications, DNA methylation, or DNA packaging might be recruited to inactivate or down regulate the nucleic acids of the invention or the encoded proteins.

[0429] Accordingly, increased yield, in particular an increased yield-related trait, e.g. an increased nutrient use efficiency, such as an enhanced nitrogen use efficiency and/or increased tolerance to environmental stress and/or increased biomass production in a plant cell, plant or part thereof, especially plant, as compared to a corresponding, e.g. non-transformed, wild type plant is in one embodiment achieved through the use of an RNA interference (dsRNAi), the introduction of an antisense nucleic acid, RNAi, snRNA, siRNA, miRNA, ta-siRNA, cosuppression molecule, or a ribozyme nucleic acid combined with an ribozyme, a nucleic acid encoding a co-suppressor, a nucleic acid encoding a dominant negative protein, DNA- or protein-binding factor or antibodies targeting said gene or -RNA or -proteins, RNA degradation inducing viral nucleic acids or a micro RNA molecule or combinations thereof against the nucleic acid molecule characterized in this paragraph.

[0430] The regulation of the abovementioned nucleic acid sequences may be modified so that gene expression is decreased. This reduction, repression, decrease or deletion (reduction, repression, decrease, deletion, inactivation or down-regulation shall be used as synonyms throughout the specification) can be achieved as mentioned above by all methods known to the skilled person, preferably by double-stranded RNA interference (dsRNAi), introduction of an antisense nucleic acid, a ribozyme, an antisense nucleic acid combined with a ribozyme, a nucleic acid encoding a co-suppressor, a nucleic acid encoding a dominant negative protein, DNA- or protein-binding factor or antibodies targeting said gene or -RNA or -proteins, RNA degradation inducing viral nucleic acids and expression systems, systems for inducing a homolog recombination of said genes, mutations in said genes or a combination of the above.

[0431] In general, an activity of a gene product in an organism or part thereof, in particular in a plant cell, a plant, or a plant tissue or a part thereof, or in a microorganism can be decreased by decreasing the amount of the specific encoding mRNA or the corresponding protein in said organism or part thereof. “Amount of protein or mRNA” is understood as meaning the molecule number of polypeptides or mRNA molecules in an organism, a tissue, a cell or a cell compartment. “Decrease” in the amount of a protein means the quantitative decrease of the molecule number of said protein in an organism, a tissue, a cell or a cell compartment or part thereof—for example by one of the methods described herein below—in comparison to a wild type, control or reference.

[0432] In this context, “inactivation” means that the activity of the polypeptide encoded is essentially no longer detectable in the organism or in the cell such as, for example, within the plant or plant cell. For the purposes of the invention, down-regulation (=reduction) means that its activity, e.g. the enzymatic or biological activity of the polypeptide encoded is partly or essentially completely reduced in comparison with the activity of the untreated organism. This can be achieved by different cell-biological mechanisms. In this context, the activity can be downregulated in the entire organism or, in the case of multi-celled organisms, in individual parts of the organism, in the case of plants for example in tissues such as the seed, the leaf, the root or other parts.

[0433] A modification, i.e. a decrease, can be caused by endogenous or exogenous factors. For example, a decrease in activity in an organism or a part thereof can be caused by adding a chemical compound such as an antagonist to the media, nutrition, soil of the plants or to the plants themselves.

[0434] In one embodiment the increased yield, in particular an increased yield-related trait, e.g. an increased nutrient use efficiency, such as an enhanced nitrogen use efficiency and/or increased tolerance to environmental stress and/or increased biomass production as compared to a corresponding, e.g. non-transformed, wild type plant can be achieved by decreasing the level of the endogenous nucleic acid molecule or the endogenous polypeptide described herein, i.e. of the nucleic acid molecule or the polypeptide which activity is to be reduced according to the process of the invention, in particular of a polynucleotide or polypeptide described in the corresponding line of table I or II, column 5 or 7, application no. 1, respectively.

[0435] Accordingly, in one further embodiment of the process of the invention the reduction, repression or deletion of the activity represented by the protein or nucleic acid molecule to be reduced in the process of the invention is achieved by at least one step selected from the group consisting of:
[0436] (a) introducing a nucleic acid molecule comprising a polynucleotide encoding a ribonucleic acid sequence, which is able to form a double-stranded ribonucleic acid molecule, whereby a fragment of at least 17, 18, 19, 20, 21, 22, 23, 24 or 25 nucleotides (nt) or more, preferably of 25, 26, 27, 28, 29, 30, 31, 32, 33, 34, 35, 36, 37, 38, 39 or 40 nucleotides (nt) or more, more preferably of 50, 60, 70, 80, 90 or 100 nucleotides (nt) or more and whereby said double-stranded ribonucleic acid molecule has an identity of 50% or more, preferably an identity of 60, 65, 70, 75, 80, 85, 90, 95, 97, 98, 99 or most preferred of 100% to the nucleic acid molecule to be reduced according to the process of the invention or a nucleic acid molecule encoding the polypeptide to be reduced according to the process of the invention or selected from the group consisting of:
   [0437] (i) the nucleic acid molecule which activity is reduced in the process of the present invention;
   [0438] (ii) a nucleic acid molecule comprising a polynucleotide as depicted in column 5 or 7 of table I, application no. 1, or encoding a polypeptide comprising a polypeptide as depicted in column 5 or 7 of table II, application no. 1, preferably, a nucleic acid molecule as depicted in column 5 or 7 of table I, application no. 1, or encoding a polypeptide as depicted in column 5 or 7 of table II, application no. 1, preferably a nucleic acid molecule as depicted in column 5 or 7 of table I A, application no. 1, or encoding a polypeptide as depicted in column 5 or 7 of table II B, application no. 1, and
   [0439] (iii) a nucleic acid molecule encoding a polypeptide having the activity of polypeptide depicted in column 5 of table II, application no. 1, or encoding the expression product of a polynucleotide comprising a nucleic acid molecule as depicted in column 5 or 7 of table I, application no. 1;
      and
[0440] (b) anyone of the steps disclosed in following paragraph:
   [0441] (i) introducing an RNAi, snRNA, dsRNA, siRNA, miRNA, ta-siRNA, cosuppression molecule, or an antisense nucleic acid molecule, whereby the RNAi, snRNA, dsRNA, siRNA, miRNA, ta-siRNA, cosuppression molecule, or antisense nucleic acid molecule comprises a fragment of 17, 18, 19, 20, 21, 22, 23, 24 or 25 nucleotides (nt) or more, preferably of 25, 26, 27, 28, 29, 30, 31, 32, 33, 34, 35, 36, 37, 38, 39 or 40 nucleotides (nt) or more, more preferably of 50, 60, 70, 80, 90 or 100 nucleotides (nt) or more with an identity of at least 30% or more, preferably of 40, 50, 60, 65, 70, 75, 80, 85, 90, 95, 97, 98, 99 or most preferably of 100% to the nucleic acid molecule to be reduced according to the process of the invention or a nucleic acid molecule encoding the polypeptide to be reduced according to the process of the invention or to a nucleic acid molecule selected from a group defined in section (a) (i) to (iii);
   [0442] (ii) introducing of a ribozyme which specifically cleaves the nucleic acid molecule to be reduced according to the process of the invention or a nucleic acid molecule encoding the polypeptide to be reduced according to the process of the invention or a nucleic acid molecule selected from a group defined in section (a) (i) to (iii);

[0443] (iii) introducing the RNAi, snRNA, dsRNA, siRNA, miRNA, ta-siRNA, cosuppression molecule, ribozyme, antibody, antisense nucleic acid molecule characterized in (b) (i) and the ribozyme characterized in (b) (ii);
[0444] (iv) introducing of a sense nucleic acid molecule conferring the expression of the nucleic acid molecule to be reduced according to the process of the invention or a nucleic acid molecule encoding the polypeptide to be reduced according to the process of the invention or of a nucleic acid molecule selected from a group defined in section (a) (i) to (iii) for inducing a co-suppression of the endogenous expression product of the nucleic acid molecule to be reduced according to the process of the invention or a nucleic acid molecule encoding the polypeptide to be reduced according to the process of the invention or of a nucleic acid molecule selected from a group defined in section (a) (i) to (iii);
[0445] (v) introducing a nucleic acid molecule comprising a polynucleotide conferring the expression of a dominant-negative mutant of a protein having the activity of a protein to be reduced according to the process of the invention or of a protein encoded by a nucleic acid molecule to be reduced according to the process of the invention or of a protein encoded by a nucleic acid molecule selected from a group defined in section (a) (i) to (iii);
[0446] (vi) introducing a nucleic acid molecule comprising a polynucleotide encoding a factor, which binds to a nucleic acid molecule comprising the nucleic acid molecule to be reduced according to the process of the invention or comprising a nucleic acid molecule encoding the polypeptide to be reduced according to the process of the invention or comprising a nucleic acid molecule selected from a group defined in section (a) (i) to (iii);
[0447] (vii) introducing a viral nucleic acid molecule conferring the decline of a RNA molecule comprising the nucleic acid molecule to be reduced according to the process of the invention or comprising a nucleic acid molecule encoding the polypeptide to be reduced according to the process of the invention or comprising a nucleic acid molecule selected from a group defined in section (a) (i) to (iii);
[0448] (viii) introducing a nucleic acid construct capable to recombinate with and silence, inactivate, repress or reduce the activity of an endogenous gene comprising the nucleic acid molecule to be reduced according to the process of the invention or comprising a nucleic acid molecule encoding the polypeptide to be reduced according to the process of the invention or comprising a nucleic acid molecule selected from a group defined in section (a) (i) to (iii);
[0449] (ix) introducing a non-silent mutation in an endogenous gene comprising the nucleic acid molecule to be reduced according to the process of the invention or comprising a nucleic acid molecule encoding the polypeptide to be reduced according to the process of the invention or comprising a nucleic acid molecule selected from a group defined in section (a) (i) to (iii); and/or
[0450] (x) introducing an expression construct conferring the expression of nucleic acid molecule characterized in any one of (b) (i) to (ix).

[0451] Accordingly, in one further embodiment of the process of the invention the reduction or deletion of the activity represented by the protein or nucleic acid molecule used in the process of the invention is achieved by at least one step selected from the group consisting of:
[0452] (a) introducing of nucleic acid molecules encoding a ribonucleic acid molecule, which sequence is able to form a double-stranded ribonucleic acid molecule, whereby the sense strand of said double-stranded ribonucleic acid molecules has a identity of at least 30%, preferably of 60, 65, 70, 75, 80, 85, 90, 95, 97, 98, 99 or 100% to the nucleic acid molecule to be reduced according to the process of the invention or a nucleic acid molecule encoding the polypeptide to be reduced according to the process of the invention or to a nucleic acid molecule selected from the group consisting of:
   [0453] (i) a nucleic acid molecule conferring the expression of a protein comprising a polypeptide, a consensus sequence or a polypeptide motif, as depicted in column 5 or 7 of table II or IV, application no. 1, or conferring the expression of nucleic acid molecule comprising a polynucleotide as depicted in column 5 or 7 of table I, application no. 1;
   [0454] (ii) a nucleic acid molecule encoding a protein having the activity of a protein to be reduced according to the process of the invention, e.g. comprising a polypeptide, a consensus sequence or a polypeptide motif as depicted in column 5 or 7 of table II or IV, application no. 1, or conferring the expression of nucleic acid molecule comprising a polynucleotide as depicted in column 5 or 7 of table I; , application no. 1, and
   [0455] (iii) a nucleic acid molecule comprising a fragment of at least 17, 18, 19, 20, 21, 22, 23, 24 or 25 base pairs of a nucleic acid molecule with a homology of at least 50% preferably of 60, 65, 70, 75, 80, 85, 90, 95, 97, 98, 99 or 100% to a nucleic acid molecule of (a) (i) or (ii);
[0456] (b) introducing an antisense nucleic acid molecule, whereby the antisense nucleic acid molecule has an identity of at least 30% or more, preferably of 40, 50, 60, 65, 70, 75, 80, 85, 90, 95, 97, 98, 99 or 100% to a nucleic acid molecule antisense to the nucleic acid molecule to be reduced according to the process of the invention or a nucleic acid molecule encoding the polypeptide to be reduced according to the process of the invention or a nucleic acid molecule selected from the group consisting of (a) (i) to (iii) above;
[0457] (c) introducing of a ribozyme which specifically cleaves a nucleic acid molecule conferring the expression of a protein having the activity of a protein to be reduced according to the process of the invention, e.g. comprising a polypeptide, a consensus sequence or a polypeptide motif as depicted in column 5 or 7 of table II or IV, application no. 1, or which specifically cleaves a nucleic acid molecule conferring the expression of the nucleic acid molecule to be reduced according to the process of the invention or the polypeptide to be reduced according to the process of the invention or a nucleic acid molecule encoding the polypeptide to be reduced according to the process of the invention or a nucleic acid molecule selected from the group consisting of (a) (i) to (iii) above;
[0458] (d) introducing of the antisense nucleic acid molecule characterized in (b) and the ribozyme characterized in (c);
[0459] (e) introducing of a sense nucleic acid molecule conferring the expression of the nucleic acid molecule to be reduced according to the process of the invention or the polypeptide to be reduced according to the process of the invention or a nucleic acid molecule encoding the polypeptide to be reduced according to the process of the invention or a nucleic acid molecule selected from the group consisting of (a) (i) to (iii) above for inducing a co-suppression of the endogenous the nucleic acid molecule to be reduced according to the process of the invention or a nucleic acid molecule encoding the polypeptide to be reduced according to the process of the invention or a nucleic acid molecule selected from the group consisting of (a) (i) to (iii) above;
[0460] (f) introducing a nucleic acid molecule conferring the expression of a dominant-negative mutant of a protein having the activity of a protein to be reduced according to the process of the invention, e.g. comprising a polypeptide, a consensus sequence or a polypeptide motif as depicted in column 5 or 7 of table II or IV, application no. 1, or of a dominant-negative mutant of a polypeptide encoded by a nucleic acid molecule selected from the group consisting of (a) (i) to (iii) above, for example expressing said sequence leading to the dominant-negative mutant protein thereby the activity of the protein used in the inventive process is reduced, decreased or deleted;
[0461] (g) introducing a nucleic acid molecule encoding a factor, which binds to a nucleic acid molecule conferring the expression of a protein having the activity of a polypeptide to be reduced according to the process of the invention, e.g. comprising a polypeptide , a consensus sequence or a polypeptide motif as depicted in column 5 or 7 of table II or IV, application no. 1, or being encoded by a nucleic acid molecule selected from the group consisting of (a) (i) to (iii) above;
[0462] (h) introducing a viral nucleic acid molecule conferring the decline of a RNA molecule conferring the expression of a protein having the activity of a protein used in the processof the invention, especially a polypeptide comprising a polypeptide, a consensus sequence or a polypeptide motif as depicted in column 5 or 7 of table II or IV, application no. 1, or being encoded by a nucleic acid molecule selected from the group consisting of (a) (i) to (iii) above;
[0463] (i) introducing a nucleic acid construct capable to recombinate with and mutate an endogenous gene conferring the expression of a protein having the activity of a protein used in the inventive process especially a polypeptide comprising a polypeptide, a consensus sequence or a polypeptide motif as depicted in column 5 or 7 of table II or IV, application no. 1, or being encoded by a nucleic acid molecule selected from the group consisting of (a) (i) to (iii) above;
[0464] (j) introducing a non-silent mutation in an endogenous gene conferring the expression of a protein having the activity of a protein used in the inventive process especially a polypeptide comprising a polypeptide, a consensus sequence or a polypeptide motif as depicted in column 5 or 7 of table II or IV, application no. 1, or being encoded by a nucleic acid molecule selected from the group consisting of (a) (i) to (iii) above;
[0465] (k) selecting of a non-silent mutation in a nucleic acid sequence encoding a protein having the activity of a protein used in the inventive process especially a polypeptide comprising a polypeptide, a consensus sequence or a polypeptide motif as depicted in column 5 or 7 of table II or IV, application no. 1, or being encoded by a nucleic acid molecule selected from the group consisting of (a) (i) to (iii) above from a randomly mutagenized population of organisms used in the inventive process; and/or
[0466] (l) introducing an expression construct conferring the expression of a nucleic acid molecule or polypeptide as characterized in any one of (a) to (k) or conferring the expression of a nucleic acid molecule or polypeptide characterized in any one of (a) to (k).

[0467] In one embodiment, the process of the present invention comprises the following step:
[0468] introducing into an endogenous nucleic acid molecule, e.g. into an endogenous gene, which confers the expression of a polypeptide comprising a polypeptide , a consensus sequence or a polypeptide motif as depicted in column 5 or 7 of table II or IV, application no. 1, or a polypeptide being encoded by a nucleic acid molecule selected from the group consisting of (a) (i) to (iii) mentioned above, a mutation of a distinct amino acid shown in the consensus sequence depicted in column 7 of table IV, application no. 1, in the same line,
   whereby the mutation confers a non-silent mutation in the polypeptide which activity is to be reduced in the process of the invention, in particular in a polypeptide comprising a polypeptide, a consensus sequence or a polypeptide motif as depicted in column 5 or 7 of table II or IV, application no. 1, or a polypeptide being encoded by a nucleic acid molecule selected from the group consisting of (a) (i) to (iii), mentioned above.

[0469] The consensus sequence depicted in column 7 of table IV, application no. 1, indicates the amino acids which were found to be strongly conserved within the sequences of the polypeptides depicted in columns 5 and 7 of table II, application no. 1. Thus, it is preferred to mutate one or more of the distinct conserved amino acids (not defined as X or Xaa) by a random mutation approach or by selectively introducing a mutation into such a amino acid or into a stretch of several conserved amino acids, for example via applying a chemical, physical or biological mutagens such as site directed mutagenesis or introducing a homologous recombination.

[0470] In one embodiment, the coding sequences of a nucleic acid molecule which activity is to be reduced in the process of the invention, in particular from the nucleic acid molecule mentioned under sections (a), (b), (c), (d), (e), (f), (g), (h), (i) or (j) of paragraph [0038.1.1.1], preferably of a nucleic acid molecule comprising a nucleic acid molecule as depicted in column 5 or 7 of table I, application no. 1, is used for the reduction, repression, decrease or deletion of the nucleic acid sequences which activity is to be reduced in the process of the invention according to the different process steps mentioned above in paragraphs [0058.1.1.1] to [0060.1.1.1], e.g. as described in Liu Q et al., Plant Physiology 129, 1732 (2002)).

[0471] Preferably less than 1000 bp, 900 bp, 800 by or 700 bp, particular preferably less than 600 bp, 500 bp, 400 bp, 300 bp, 200 by or 100 by of the coding region of the said nucleic acid sequence are used.

[0472] The skilled person knows that it is possible starting from the nucleic acid sequences disclosed herein as the nucleic acid molecule which activity is to be reduced in the process of the invention to reduce or delete the activity particularly of orthologs of the molecules disclosed herein. In particular, the skilled person knows how to isolate the complete gene, the coding region (CDR), the expressed regions (e.g. as cDNA), or fragments thereof of said nucleic acid sequences, in particular said regions of molecules as indicated in table I, column 5 or 7, application no. 1, if not already disclosed herein, e.g. starting from the nucleic acid molecule mentioned under sections (a) to (j) of paragraph [0039.1.1.1] above, preferably starting from a nucleic acid molecule comprising a nucleic acid molecule as depicted in column 5 or 7 of table I, application no. 1.

[0473] In one embodiment, the 5′- and/or 3′-sequences of a nucleic acid molecule which activity is to be reduced in the process of the invention, in particular from the nucleic acid molecule mentioned under sections (a), (b), (c), (d), (e), (f), (g), (h), (i) or to (j) of paragraph [0038.1.1.1], preferably of a nucleic acid molecule comprising a nucleic acid molecule as depicted in column 5 or 7 of table I, application no. 1, is used for the reduction, repression, decrease or deletion of the nucleic acid sequences which activity is to be reduced in the process of the invention according to the different process steps (a) to (j) mentioned above in paragraphs [0058.1. 1.1] to [0060.1. 1.1], e.g. as described in Ifuku K. et al., Biosci. Biotechnol. Biochem., 67 (1), 107 (2003).

[0474] Preferably less than 1000 bp, 900 bp, 800 by or 700 bp, particular preferably less than 600 bp, 500 bp, 400 bp, 300 bp, 200 by or 100 by of the 5′- and/or 3′-region of the said nucleic acid sequence are used.

[0475] The skilled person knows that it is possible starting from the nucleic acid sequences disclosed herein as the nucleic acid molecule which activity is to be reduced in the process of the invention to isolate the UTRs of said molecules. In particular, the skilled person knows how to isolate the 5′- and/or 3′-regions of said nucleic acid sequences, in particular the 5′- and/or 3′-regions of the molecules indicated in table I, column 5 or 7, application no. 1, if not already disclosed herein, e.g. starting from the nucleic acid molecule mentioned under sections (a) to (j) of paragraph [0038.1.1.1] above, preferably starting from a nucleic acid molecule comprising a nucleic acid molecule as depicted in column 5 or 7 of table I, application no. 1.

[0476] 5′- and 3′-regions can be isolated by different methods like RACE (Zang and Frohman, Methods Mol Biol 69, 61 (1997) or genomic walking PCR technologies (Mishra et al., Biotechniques 33 (4), 830 (2002); Spertini et al., Biotechniques 27 (2), 308 (1999)).

[0477] The aforementioned process steps of the reduction or deletion of the biological activity represented by the protein of the invention lead to an increased yield, in particular an increased yield-related trait, e.g. an increased nutrient use efficiency, such as an enhanced nitrogen use efficiency and/or increased tolerance to environmental stress and/or increased biomass production as compared to a corresponding, e.g. non-transformed, wild type plant.

[0478] A reduction in the activity or the function is preferably achieved by a reduced expression of a gene encoding the protein of the inventive process.

[0479] In a preferred embodiment of the process of the invention, said reduction of the activity or function of the activity of a gene product encoding the nucleic acid molecule or the polypeptide to be reduced according to the process of the invention, e.g. a polypeptide encoded by nucleic acid molecules comprising the nucleic acid molecules shown in column 5 or 7 of table I, application no. 1, or a polypeptide comprising the amino acid sequences, consensus sequences or polypeptide motifs shown in column 5 or 7 of table II, application no. 1, or in column 7 of table IV, application no. 1, or a nucleic acid molecule comprising the nucleic acid molecules shown in column 5 or 7 of table I, application no. 1, or encoding a polypeptide comprising the amino acid sequences, consensus sequences or polypeptide motifs shown in column 5 or 7 of table II or IV, application no. 1, can be achieved for example using the following methods:
[0480] (a) introduction of a double-stranded RNA nucleic acid sequence (dsRNA) as described above or of an expression cassette, or more than one expression cassette, ensuring the expression of the latter;
[0481] (b) introduction of an antisense nucleic acid sequence or of an expression cassette ensuring the expression of the latter. Encompassed are those methods in which the antisense nucleic acid sequence is directed against a gene (i.e. genomic DNA sequences including the promoter sequence) or a gene transcript (i.e. RNA sequences) including the 5′ and 3″non-translated regions. Also encompassed are alpha-anomeric nucleic acid sequences;
[0482] (c) introduction of an antisense nucleic acid sequence in combination with a ribozyme or of an expression cassette ensuring the expression of the former;
[0483] (d) introduction of sense nucleic acid sequences for inducing cosuppression or of an expression cassette ensuring the expression of the former;
[0484] (e) introduction of a nucleic acid sequence encoding dominant-negative protein or of an expression cassette ensuring the expression of the latter;
[0485] (f) introduction of DNA-, RNA- or protein-binding factor or antibodies against genes, RNA's or proteins or of an expression cassette ensuring the expression of the latter;
[0486] (g) introduction of viral nucleic acid sequences and expression constructs which bring about the degradation of RNA, or of an expression cassette ensuring the expression of the former;
[0487] (h) introduction of constructs for inducing homologous recombination on endogenous genes, for example for generating knockout mutants;
[0488] (i) introduction of mutations into endogenous genes for generating a loss of function (e.g. generation of stop codons, reading-frame shifts and the like);
[0489] (j) introduction of a microRNA or micro-RNA (miRNA) that has been designed to target the gene of interest in order to induce a breakdown or translation inhibition of the mRNA of the gene of interest and thereby silence gene expression or of an expression cassette ensuring the expression of the former;
[0490] (k) introduction of a ta-sRNA that has been designed to target the gene of interest in order to induce breakdown or translational inhibition of the mRNA of the gene of interest and thereby silence gene expression or of an expression cassette ensuring the expression of the former; and/or
[0491] (l) identifying a non silent mutation, e.g. generation of stop codons, reading-frame shifts, inversions and the like in random mutagenized population, e.g. according to the so called TILLING method.

[0492] Each of these methods may bring about a reduction in the expression, the activity or the function for the purposes of the invention. A combined use is also feasible. Further methods are known to the skilled worker and may encompass all possible steps of gene expression, like hindering or preventing processing of the protein, transport of the protein or its mRNA, inhibition of ribosomal attachment, inhibition of RNA splicing, induction of an enzyme which degrades RNA or the protein of the invention and/or inhibition of translational elongation or termination.

[0493] Accordingly, the following paragraphs relate preferably to the repression, reduction, decrease or deletion of an activity selected from the group consisting of At1g74730-protein, At3g63270-protein, protein kinase, protein serine/threonine phosphatase, and SET domain-containing protein, or an activity being represented by a nucleic acid molecule or polypeptide which activity is to be reduced in the process of the invention, in particular of a nucleic acid molecule comprising a polynucleotide as depicted in column 5 or 7, of table I, application no. 1, preferably of column 5, or encoding a polypeptide comprising a polypeptide, a consensus sequence or polypeptide motif as depicted in column 5 or 7 of table II or IV, application no. 1, preferably of column 5.

[0494] What follows is a brief description of the individual preferred methods.

[0495] a) Introduction of a double-stranded RNA nucleic acid sequence (dsRNA) e.g. for the reduction or deletion of activity of the nucleic acid molecule or polypeptide which activity is to be reduced in the process of the invention, in particular of a nucleic acid molecule comprising a polynucleotide as depicted in column 5 or 7, of table I, application no. 1, or encoding a polypeptide comprising a polypeptide, consensus sequence or polypeptide motif as depicted in column 5 or 7 of table II or IV, application no. 1,

[0496] The method of regulating genes by means of double-stranded RNA (“double-stranded RNA interference”; dsRNAi) has been described extensively for animal, yeast, fungi and plant organisms such as Neurospora, Zebrafish, Drosophila, mice, planaria, humans, Trypanosoma, petunia or Arabidopsis (for example Matzke M A et al., Plant Mol. Biol. 43, 401 (2000); Fire A. et al., Nature 391, 806 (1998); WO 99/32619; WO 99/53050; WO 00/68374; WO 00/44914; WO 00/44895; WO 00/49035; WO 00/63364). In addition RNAi is also documented as an advantageously tool for the repression of genes in bacteria such as E. coli for example by Tchurikov et al. (J. Biol. Chem., 275 (34), 26523 (2000)). Fire et al. named the phenomenon RNAi for RNA interference. The techniques and methods described in the above references are expressly referred to. Efficient gene suppression can also be observed in the case of transient expression or following transient transformation, for example as the consequence of a biolistic transformation (Schweizer P. et al., Plant J 24, 895 (2000)). dsRNAi methods are based on the phenomenon that the simultaneous introduction of complementary strand and counterstrand of a gene transcript brings about highly effective suppression of the expression of the gene in question. The resulting phenotype is very similar to that of an analogous knock-out mutant (Waterhouse P. M., et al., Proc. Natl. Acad. Sci. USA 95, 13959 (1998)).

[0497] Tuschl et al., Gens Dev., 13 (24), 3191 (1999), were able to show that the efficiency of the RNAi method is a function of the length of the duplex, the length of the 3′-end overhangs, and the sequence in these overhangs.

[0498] Accordingly, another embodiment of the invention is a double-stranded RNA molecule (dsRNA), which confers—after being introduced or expressed in a suitable organism, e.g. a plant, or a part thereof—the reduction, repression, decrease or deletion of the an activity selected from the group consisting of: At1g74730-protein, At3g63270-protein, protein kinase, protein serine/threonine phosphatase, and SET domain-containing protein.

[0499] Based on the work of Tuschl et al. and assuming that the underlining principles are conserved between different species the following guidelines can be given to the skilled worker. Accordingly, the dsRNA molecule of the invention or used in the process of the invention preferable fulfills at least one of the following principles:
[0500] to achieve good results the 5′ and 3′ untranslated regions of the used nucleic acid sequence and regions close to the start codon should be in general avoided as this regions are richer in regulatory protein binding sites and interactions between RNAi sequences and such regulatory proteins might lead to undesired interactions;
[0501] in plants the 5′ and 3′ untranslated regions of the used nucleic acid sequence and regions close to the start codon preferably 50 to 100 nt upstream of the start codon give good results and therefore should not be avoided;
[0502] preferably a region of the used mRNA is selected, which is 50 to 100 nt (=nucleotides or bases) downstream of the AUG start codon;
[0503] only dsRNA (=double-stranded RNA) sequences from exons are useful for the method, as sequences from introns have no effect;
[0504] the G/C content in this region should be greater than 30% and less than 70% ideally around 50%;
[0505] a possible secondary structure of the target mRNA is less important for the effect of the RNAi method.

[0506] The dsRNAi method can be particularly effective and advantageous for reducing the expression of the nucleic acid molecule which activity is to be reduced in the process of the invention, particular of a nucleic acid molecule comprising a polynucleotide as depicted in column 5 or 7, of table I, application no. 1, or encoding a polypeptide comprising a polypeptide, consensus sequence or polypeptide motif as depicted column 5 or 7 of table II or IV, application no. 1, and/or homologs thereof. As described inter alia in WO 99/32619, dsRNAi approaches are clearly superior to traditional antisense approaches.

[0507] Accordingly, the invention therefore furthermore relates to double-stranded RNA molecules (dsRNA molecules) which, when introduced into an organism, advantageously into a plant (or a cell, tissue, organ or seed derived therefrom), bring about altered metabolic activity by the reduction in the expression of the nucleic acid molecule which activity is reduced in the process of the invention, particular of a nucleic acid molecule comprising a polynucleotide as depicted in column 5 or 7, of table I, application no. 1, or encoding a polypeptide comprising a polypeptide, consensus sequence or polypeptide motif as depicted in column 5 or 7 of table II or IV, application no. 1, and/or homologs thereof.

[0508] In a double-stranded RNA molecule of the invention, e.g. a dsRNA for reducing the expression of a protein encoded by a nucleic acid molecule which activity is to be reduced in the process of the invention, particular of a nucleic acid molecule comprising a polynucleotide as depicted in column 5 or 7, of table I, application no. 1, and/or homologs thereof,
[0509] i) one of the two RNA strands is essentially identical to at least part of a nucleic acid sequence, and
[0510] ii) the respective other RNA strand is essentially identical to at least part of the complementary strand of a nucleic acid sequence.

[0511] The term “essentially identical” refers to the fact that the dsRNA sequence may also include insertions, deletions and individual point mutations in comparison to the target sequence while still bringing about an effective reduction in expression. Preferably, the identity as defined above amounts to at least 30%, preferably at least 40%, 50%, 60%, 70% or 80%, very especially preferably at least 90%, most preferably 100%, between the “sense” strand of an inhibitory dsRNA and a part-segment of a nucleic acid sequence of the invention including in a preferred embodiment of the invention their endogenous 5′- and 3′ untranslated regions or between the “antisense” strand and the complementary strand of a nucleic acid sequence, respectively. The part-segment amounts to at least 10 bases, preferably at least 17, 18, 19, 20, 21, 22, 23, 24, 25, 26, 27, 28, 29 or 30 bases, especially preferably at least 40, 50, 60, 70, 80 or 90 bases, very especially preferably at least 100, 200, 300 or 400 bases, most preferably at least 500, 600, 700, 800, 900 or more bases or at least 1000 or 2000 bases or more in length. In another preferred embodiment of the invention the part-segment amounts to 17, 18, 19, 20, 21, 22, 23, 24, 25, 26 or 27 bases, preferably to 20, 21, 22, 23, 24 or 25 bases. These short sequences are preferred in animals and plants. The longer sequences preferably between 200 and 800 bases are preferred in non-mammalian animals, preferably in invertebrates, in yeast, fungi or bacteria, but they are also useable in plants. Long double-stranded RNAs are processed in the organisms into many siRNAs (=small/short interfering RNAs) for example by the protein Dicer, which is a ds-specific Rnase III enzyme. As an alternative, an “essentially identical” dsRNA may also be defined as a nucleic acid sequence, which is capable of hybridizing with part of a gene transcript (for example in 400 mM NaCl, 40 mM PIPES pH 6.4, 1 mM EDTA at 50° C. or 70° C. for 12 to 16 h).

[0512] The dsRNA may consist of one or more strands of polymerized ribonucleotides. Modification of both the sugar-phosphate backbone and of the nucleosides may furthermore be present. For example, the phosphodiester bonds of the natural RNA can be modified in such a way that they encompass at least one nitrogen or sulfur heteroatom. Bases may undergo modification in such a way that the activity of, for example, adenosine deaminase is restricted. These and other modifications are described herein below in the methods for stabilizing antisense RNA.

[0513] The dsRNA can be prepared enzymatically; it may also be synthesized chemically, either in full or in part. Short dsRNA up to 30 bp, which effectively mediate RNA interference, can be for example efficiently generated by partial digestion of long dsRNA templates using E. coli ribonuclease III (RNase III). (Yang, D. et al. Proc. Natl. Acad. Sci. USA 99, 9942 (2002))

[0514] The double-stranded structure can be formed starting from a single, self-complementary strand or starting from two complementary strands. In a single, self-complementary strand, “sense” and “antisense” sequence can be linked by a linking sequence (“linker”) and form for example a hairpin structure. Preferably, the linking sequence may take the form of an intron, which is spliced out following dsRNA synthesis. The nucleic acid sequence encoding a dsRNA may contain further elements such as, for example, transcription termination signals or polyadenylation signals. If the two strands of the dsRNA are to be combined in a cell or an organism advantageously in a plant, this can be brought about in a variety of ways:
[0515] (a) transformation of the cell or of the organism, advantageously of a plant, with a vector encompassing the two expression cassettes;
[0516] (b) cotransformation of the cell or of the organism, advantageously of a plant, with two vectors, one of which encompasses the expression cassettes with the “sense” strand while the other encompasses the expression cassettes with the “antisense” strand;
[0517] (c) supertransformation of the cell or of the organism, advantageously of a plant, with a vector encompassing the expression cassettes with the “sense” strand, after the cell or the organism had already been transformed with a vector encompassing the expression cassettes with the “antisense” strand or vice versa;
[0518] (d) hybridization e.g. crossing of two organisms, advantageously of plants, each of which has been transformed with one vector, one of which encompasses the expression cassette with the “sense” strand while the other encompasses the expression cassette with the “antisense” strand;
[0519] (e) introduction of a construct comprising two promoters that lead to transcription of the desired sequence from both directions; and/or
[0520] (f) infecting of the cell or of the organism, advantageously of a plant, with an engineered virus, which is able to produce the desired dsRNA molecule.

[0521] Formation of the RNA duplex can be initiated either outside the cell or within the cell. If the dsRNA is synthesized outside the target cell or organism it can be introduced into the organism or a cell of the organism by injection, microinjection, electroporation, high velocity particles, by laser beam or mediated by chemical compounds (DEAE-dextran, calciumphosphate, liposomes) or in case of animals it is also possible to feed bacteria such as E. coli strains engineered to express double-stranded RNAi to the animals.

[0522] Accordingly, in one embodiment, the present invention relates to a dsRNA whereby the sense strand of said double-stranded RNA nucleic acid molecule has an identity of at least 30%, 35%, 40%, 45%, 50%, 55% or 60%, preferably 65%, 70%, 75% or 80%, more preferably 85%, 90%, 95%, 96%, 97%, 98% or 99% or more preferably 95%, 96%, 97%, 98%, 99% or 100% to a nucleic acid molecule comprising a nucleic acid molecule as depicted in column 5 or 7 of table I, application no. 1, preferably as depicted in table I B, application no. 1, or encoding a polypeptide comprising a polypeptide as depicted in column 5 or 7 of table II, application no. 1, preferably as depicted in table II B, application no. 1, or of table IV, application no. 1.

[0523] Another embodiment of the invention is a dsRNA molecule, comprising a fragment of at least 10 base paires (=bases, nt, nucleotides), preferably at least 17, 18, 19, 20, 21, 22, 23, 24, 25, 26, 27, 28, 29, 30, 35, 40, 45 or 50, especially preferably at least 55, 60, 70, 80 or 90 base pairs, very especially preferably at least 100, 200, 300 or 400 base pairs, most preferably at least 500, 600, 700, 800, 900 or more base pairs or at least 1000 or 2000 base pairs of a nucleic acid molecule with an identity of at least 50%, 60%, 70%, 80% or 90%, preferably 95%, 96%, 97%, 98%, 99% or 100% to a nucleic acid molecule as depicted in column 5 or 7 of Table I, preferably as depicted in table I B, application no. 1, or to the nucleic acid molecule encoding a polypeptide protein comprising a polypeptide as depicted in column 5 or 7 of table II, application no. 1, preferably as depicted in table II B, application no. 1, or of table IV, application no. 1.

[0524] In another preferred embodiment of the invention the encoded sequence or its part-segment of the dsRNA molecule amounts to 17, 18, 19, 20, 21, 22, 23, 24, 25, 26 or 27 bases, preferably to 20, 21, 22, 23, 24 or 25 bases, whereby the identity of the sequence is essentially 95%, 96%, 97%, 98%, or preferred 99% or 100%.

[0525] The expression of the dsRNA molecule of the invention confers increased yield, in particular an increased yield-related trait, e.g. an increased nutrient use efficiency, such as an enhanced nitrogen use efficiency and/or increased tolerance to environmental stress and/or increased biomass production as compared to a corresponding, e.g. non-transformed, wild type plant in the organism or part thereof.

[0526] In a preferred embodiment of the invention the sense and antisense strand of the double-stranded RNA are covalently bound or are bound by other, e.g. weak chemical bonds such as hydrogen bonds to each other and the antisense strand is essentially the complement of the sense-RNA strand.

[0527] As shown in WO 99/53050, the dsRNA may also encompass a hairpin structure, by linking the “sense” and “antisense” strands by a “linker” (for example an intron), which is hereby incorporated by reference. The self-complementary dsRNA structures are preferred since they merely require the expression of a construct and always encompass the complementary strands in an equimolar ratio.

[0528] The expression cassettes encoding the “antisense” or the “sense” strand of the dsRNA or the self-complementary strand of the dsRNA are preferably inserted into a vector and stably inserted into the genome of a plant, using the methods described herein below (for example using selection markers), in order to ensure permanent expression of the dsRNA. Transient expression with bacterial or viral vectors are similar useful.

[0529] The dsRNA can be introduced using an amount which makes possible at least one copy per cell. A larger amount (for example at least 5, 10, 100, 500 or 1 000 copies per cell) may bring about more efficient reduction.

[0530] As has already been described, 100% sequence identity between the dsRNA and a gene transcript of a nucleic acid molecule to be reduced according to the process of the invention, e.g. of one of the molecules comprising a molecule as shown in column 5 or 7 of table I, application no. 1, or encoding a polypeptide encompassing a polypeptide, a consensus sequence or a polypeptide motif as shown in column 5 or 7 of table II or IV, application no. 1, or it's homolog is not necessarily required in order to bring about effective reduction in the expression. The advantage is, accordingly, that the method is tolerant with regard to sequence deviations as may be present as a consequence of genetic mutations, polymorphisms or evolutionary divergences. Thus, for example, using the dsRNA, which has been generated starting from a nucleic acid molecule to be reduced according to the process of the invention, e.g. of one of the molecules comprising a molecule as shown in column 5 or 7 of table I, application no. 1, or encoding a polypeptide encompassing a polypeptide, a consensus sequence or a motif as shown in column 5 or 7 of table II or IV, application no. 1, or homologs thereof of the one organism, may be used to suppress the corresponding expression in another organism.

[0531] The high degree of sequence homology or identity between nucleic acid molecules to be reduced according to the process of the invention, from various organisms (e.g. plants), e.g. of one of the molecules comprising a molecule as depicted in column 5 or 7 of table I, application no. 1, preferably of table I B or encoding a polypeptide encompassing a polypeptide, a consensus sequence, or a polypeptide motif as depicted in column 5 or 7 of table II or IV, application no. 1, preferably table II B, allows the conclusion that these proteins are likely conserved to a high degree within the evolution, for example also in other plants, and therefore it is optionally possible that the expression of a dsRNA derived from one of the disclosed nucleic acid molecule to be reduced according to the process of the invention, e.g. of one of the molecules comprising a molecule as depicted in column 5 or 7 of table I, application no. 1, or encoding a polypeptide encompassing a polypeptide, a consensus sequence or a polypeptide motif as depicted in column 5 or 7 of table II or IV, application no. 1, or homologs thereof should also have an advantageous effect in other plant species.

[0532] The dsRNA can be synthesized either in vivo or in vitro. To this end, a DNA sequence encoding a dsRNA can be introduced into an expression cassette under the control of at least one genetic control element (such as, for example, promoter, enhancer, silencer, splice donor or splice acceptor or polyadenylation signal). Suitable advantageous constructs are described herein below. Polyadenylation is not required, nor do elements for initiating translation have to be present.

[0533] A dsRNA can be synthesized chemically or enzymatically. Cellular RNA polymerases or bacteriophage RNA polymerases (such as, for example T3, T7 or SP6 RNA polymerase) can be used for this purpose. Suitable methods for the in-vitro expression of RNA are described (WO 97/32016; U.S. Pat. No. 5,593,874; U.S. Pat. No. 5,698,425, U.S. Pat. No. 5,712,135, U.S. Pat. No. 5,789,214, U.S. Pat. No. 5,804,693). Prior to introduction into a cell, tissue or organism, a dsRNA which has been synthesized in vitro either chemically or enzymatically can be isolated to a higher or lesser degree from the reaction mixture, for example by extraction, precipitation, electrophoresis, chromatography or combinations of these methods. The dsRNA can be introduced directly into the cell or else be applied extracellularly (for example into the interstitial space). In one embodiment of the invention the RNAi method leads to only a partial loss of gene function and therefore enables the skilled worker to study a gene dose effect in the desired organism and to fine tune the process of the invention. In another preferred embodiment it leads to a total loss of function and therefore increases yield, in particular a yield-related trait, e.g. an nutrient use efficiency, such as nitrogen use efficiency and/or tolerance to environmental stress and/or biomass production as compared to a corresponding, e.g. non-transformed, wild type plant. Furthermore it enables a person skilled in the art to study multiple functions of a gene.

[0534] Stable transformation of the plant with an expression construct, which brings about the expression of the dsRNA is preferred, however. Suitable methods are described herein below.

[0535] Introduction of an antisense nucleic acid sequence, e.g. for the reduction, repression or deletion of the nucleic acid molecule or polypeptide which activity is to be reduced in the process of the invention, in particular of a nucleic acid molecule comprising a polynucleotide as depicted in column 5 or 7 of table I, application no. 1, or encoding a polypeptide comprising a polypeptide, a consensus sequence or a polypeptide motif as depicted in column 5 or 7 of table II or IV, application no. 1.

[0536] Methods for suppressing a specific protein by preventing the accumulation of its mRNA by means of “antisense” technology can be used widely and has been described extensively, including for plants; Sheehy et al., Proc. Natl. Acad. Sci. USA 85, 8805 (1988); U.S. Pat. No. 4,801,34100; Mol. J. N. et al., FEBS Lett 268 (2), 427 (1990). The antisense nucleic acid molecule hybridizes with, or binds to, the cellular mRNA and/or the genomic DNA encoding the target protein to be suppressed. This process suppresses the transcription and/or translation of the target protein. Hybridization can be brought about in the conventional manner via the formation of a stable duplex or, in the case of genomic DNA, by the antisense nucleic acid molecule binding to the duplex of the genomic DNA by specific interaction in the large groove of the DNA helix.

[0537] In one embodiment, an “antisense” nucleic acid molecule comprises a nucleotide sequence, which is at least in part complementary to a “sense” nucleic acid molecule encoding a protein, e.g., complementary to the coding strand of a double-stranded cDNA molecule or complementary to an encoding mRNA sequence. Accordingly, an antisense nucleic acid molecule can bind via hydrogen bonds to a sense nucleic acid molecule. The antisense nucleic acid molecule can be complementary to an entire coding strand of a nucleic acid molecule conferring the expression of the polypeptide to be reduced in the process of the invention or comprising the nucleic acid molecule which activity is to be reduced in the process of the invention or to only a portion thereof. Accordingly, an antisense nucleic acid molecule can be antisense to a “coding region” of the coding strand of a nucleotide sequence of a nucleic acid molecule of the present invention.

[0538] The term “coding region” refers to the region of the nucleotide sequence comprising codons, which are translated into amino acid residues.

[0539] In another embodiment, the antisense nucleic acid molecule is antisense to a “noncoding region” of the mRNA flanking the coding region of a nucleotide sequence. The term “non-coding region” refers to 5′ and 3′ sequences which flank the coding region that are not translated into a polypeptide, i.e., also referred to as 5′ and 3′ untranslated regions (5′-UTR or 3′-UTR). Advantageously the noncoding region is in the area of 50 bp, 100 bp, 200 bp or 300 bp, preferrably 400 bp, 500 bp, 600 bp, 700 bp, 800 bp, 900 by or 1000 by up- and/or downstream from the coding region.

[0540] Given the coding strand sequences encoding the polypeptide or the nucleic acid molecule to be reduced in the process of the invention, e.g. having above mentioned activity, e.g. the activity of a polypeptide with the activity of the protein which activity is to be reduced in the process of the invention as disclosed herein, antisense nucleic acid molecules can be designed according to the rules of Watson and Crick base pairing.

[0541] Accordingly, yet another embodiment of the invention is an antisense nucleic acid molecule, which confers—after being expressed in a suitable organism, e.g. a plant, or a part thereof—the reduction, repression, or deletion of the an activity selected from the group consisting of At1g74730-protein, At3g63270-protein, protein kinase, protein serine/threonine phosphatase, and SET domain-containing protein.

[0542] Accordingly, in another embodiment, the invention relates to an antisense nucleic acid molecule, whereby the antisense nucleic acid molecule has an identity of at least 30%, preferably at least 40%, 50%, 60%, especially 70%, 80%, 85%, 90%, 95% to a nucleic acid molecule antisense to a nucleic acid molecule encoding the protein as shown in column 5 or 7 of table II, application no. 1, preferably as depicted in table II B, application no. 1, or encoding a protein encompassing a consensus sequence or a polypeptide motif as depicted in of table IV, application no. 1, or being encoded by a nucleic acid molecule comprising a polynucleotide as depicted in column 5 or 7 of table I, application no. 1, preferably as depicted in table I B, application no. 1, or a homologue thereof as described herein and which confers increased yield, in particular an increased yield-related trait, e.g. an increased nutrient use efficiency, such as an enhanced nitrogen use efficiency and/or increased tolerance to environmental stress and/or increased biomass production as compared to a corresponding, e.g. non-transformed, wild type plant, respectively after its expression.

[0543] Thus in another embodiment, the antisense nucleic acid molecule of the invention comprises a fragment of at least 15, 16, 17, 18, 19, 20, 21, 22, 23, 24, 25, 26, 27, 28, 29, 30, 35, 40, 45 or 50, especially preferably at least 60, 70, 80 or 90 base pairs, very especially preferably at least 100, 200, 300 or 400 base pairs, most preferably at least 500, 600, 700, 800, 900 or more base pairs or at least the entire sequence of a nucleic acid molecule with an identity of at least 50% 60%, 70%, 80% or 90%, preferably 100% to an antisense nucleic acid molecule to a nucleic acid molecule conferring the expression of a protein as depicted in column 5 or 7 of table II, application no. 1, preferably as depicted in table II B, application no. 1, or encoding a protein encompassing a consensus sequence or a polypeptide motif as depicted in Table IV, application no. 1, or being encoded by a nucleic acid molecule comprising a polynucleotide as depicted in column 5 or 7 of table I, application no. 1, preferably as depicted in table I B, application no. 1, or a homologue thereof as described herein and which confers after its expression enhancement of yield, in particular of a yield-related trait, e.g. NUE and/or increased biomass production as compared to a corresponding, e.g. non-transformed, wild type plant.

[0544] An antisense nucleic acid sequence which is suitable for reducing the activity of a protein can be deduced using the nucleic acid sequence encoding this protein, for example the nucleic acid sequence which activity is to be reduced in the process of the invention, e.g. comprising a nucleic acid molecule as depicted in column 5 or 7 of table I, application no. 1, or a nucleic acid molecule encoding a polypeptide comprising a polypeptide, a consensus sequence or a polypeptide as depicted in column 5 or 7 of table II or IV, application no. 1, (or homologs, analogs, paralogs, orthologs thereof), by applying the base-pair rules of Watson and Crick. The antisense nucleic acid sequence can be complementary to all of the transcribed mRNA of the protein; it may be limited to the coding region, or it may only consist of one oligonucleotide, which is complementary to part of the coding or noncoding sequence of the mRNA. Thus, for example, the oligonucleotide can be complementary to the nucleic acid region, which encompasses the translation start for the protein. Antisense nucleic acid sequences may have an advantageous length of, for example, 5, 10, 15, 20, 25, 30, 35, 40, 45 or 50 nucleotides but they may also be longer and encompass at least 100, 200, 500, 1000, 2000 or 5000 nucleotides. A particular preferred length is between 15 and 30 nucleotides such as 15, 20, 25 or 30 nucleotides. Antisense nucleic acid sequences can be expressed recombinantly or synthesized chemically or enzymatically using methods known to the skilled worker. For example, an antisense nucleic acid molecule (e.g., an antisense oligonucleotide) can be chemically synthesized using naturally occurring nucleotides or variously modified nucleotides designed to increase the biological stability of the molecules or to increase the physical stability of the duplex formed between the antisense and sense nucleic acids, e.g., phosphorothioate derivatives and acridine substituted nucleotides can be used. Examples of substances which can be used are phosphorothioate derivatives and acridine-substituted nucleotides such as 5-fluorouracil, 5-bromouracil, 5-chlorouracil, 5-iodouracil, hypoxanthin, xanthin, 4-acetylcytosine, 5-(carboxyhydroxymethyl)uracil, 5-carboxymethylaminomethyl-2-thiouridine, 5-carboxymethylaminomethyluracil, dihydrouracil, beta-D-galactosylqueosine, inosine, N6-isopentenyladenine, 1-methylguanine, 1-methylinosine, 2,2-dimethylguanine, 2-methyladenine, 2-methylguanine, 3-methylcytosine, 5-methylcytosine, N6-adenine, 7-methylguanine, 5-methylaminomethyluracil, 5-methoxyaminomethyl-2-thiouracil, beta-D-mannosylqueosine, 5′-methoxycarboxymethyluracil, 5-methoxyuracil, 2-methylthio-N-6-isopentenyladenine, uracil-5-oxyacetic acid, pseudouracil, queosine, 2-thiocytosine, 5-methyl-2-thiouracil, 2-thiouracil, 4-thiouracil, 5-methyluracil, methyl uracil-5-oxyacetate, uracil-5-oxyacetic acid, 5-methyl-2-thiouracil, 3-(3-amino-3-N-2-carboxypropyl)uracil and 2,6-diaminopurine. Alternatively, the antisense nucleic acid can be produced biologically using an expression vector into which a nucleic acid molecule has been subcloned in an anti-sense orientation (i.e., RNA transcribed from the inserted nucleic acid molecule will be of an antisense orientation to a target nucleic acid molecule of interest, described further in the following subsection).

[0545] In a further preferred embodiment, the expression of a protein which activity is to be reduced in the process of the invention, e.g. encoded by a nucleic acid molecule comprising a nucleic acid molecule as depicted in column 5 or 7 of table I, application no. 1, or of a polypeptide comprising a polypeptide, a consensus sequence or a polypeptide motif as depicted in column 5 or 7 of table II or IV, application no. 1, or homologs, analogs, paralogs, orthologs thereof can be inhibited by nucleotide sequences which are complementary to the regulatory region of a gene (for example a promoter and/or enhancer) and which may form triplex structures with the DNA double helix in this region so that the transcription of the gene is reduced. Such methods have been described (Helene C., Anticancer Drug Res. 6 (6), 569 (1991); Helene C. et al., Ann. NY Acad. Sci. 660, 27 (1992); Maher L. J ., Bioassays 14 (12), 807 (1992)).

[0546] In a further embodiment, the antisense nucleic acid molecule can be an alpha-anomeric nucleic acid. Such alpha-anomeric nucleic acid molecules form specific double-stranded hybrids with complementary RNA in which—as opposed to the conventional b-nucleic acids—the two strands run in parallel with one another (Gautier C et al., Nucleic Acids Res. 15, 6625 (1987)). Furthermore, the antisense nucleic acid molecule can also comprise 2′-O-methylribonucleotides (Inoue et al., Nucleic Acids Res. 15, 6131 (1987)), or chimeric RNA-DNA analogs (Inoue et al., FEBS Lett 215, 327 (1987)).

[0547] The antisense nucleic acid molecules of the invention are typically administered to a cell or generated in situ such that they hybridize with or bind to cellular mRNA and/or genomic DNA encoding a polypeptide having the activity of protein which activity is to be reduced in the process of the invention or encoding a nucleic acid molecule having the activity of the nucleic acid molecule which activity is to be reduced in the process of the invention and thereby inhibit expression of the protein, e.g., by inhibiting transcription and/or translation and leading to the aforementioned increased yield, in particular an increased yield-related trait, e.g. an increased nutrient use efficiency, such as an enhanced nitrogen use efficiency and/or increased tolerance to environmental stress and/or increased biomass production as compared to a corresponding, e.g. non-transformed, wild type plant.

[0548] The antisense molecule of the present invention comprises also a nucleic acid molecule comprising a nucleotide sequences complementary to the regulatory region of an nucleotide sequence encoding the natural occurring polypeptide of the invention, e.g. the polypeptide sequences shown in the sequence listing, or identified according to the methods described herein, e.g., its promoter and/or enhancers, e.g. to form triple helical structures that prevent transcription of the gene in target cells. See generally, Helene C., (1991) Anticancer Drug Des. 6 (6), 569 (1991); Helene C. et al., (1992) Ann. N.Y. Acad. Sci. 660, 27 (1992); and Maher L. J., Bioassays 14 (12), 807 (1992).

[0549] c) Introduction of an antisense nucleic acid sequence combined with a ribozyme, e.g. for the reduction or deletion of activity of the nucleic acid molecule or polypeptide which activity is to be reduced in the process of the invention, in particular of a nucleic acid molecule comprising a polynucleotide as depicted in column 5 or 7 of table I, application no. 1, or encoding a polypeptide comprising a polypeptide as depicted in column 5 or 7 of table II or IV, application no. 1.

[0550] Yet another embodiment of the invention is a ribozyme, which confers—after being expressed in a suitable organism, e.g. a plant, or a part thereof—the reduction, repression, decrease or deletion of the activity selected from the group consisting of At1g74730-protein, At3g63270-protein, protein kinase, protein serine/threonine phosphatase, and SET domain-containing protein.

[0551] Thus, in a further embodiment, the invention relates to a ribozyme, which specifically cleaves a nucleic acid molecule conferring expression of a protein as depicted in column 5 or 7 of table II, application no. 1, preferably as depicted in table II B, application no. 1, or comprising a consensus sequence or a polypeptide motif as depicted in table IV, application no. 1, or being encoded by a nucleic acid molecule comprising a polynucleotide as depicted in column 5 or 7 of table I, application no. 1, preferably as depicted in table I B, application no. 1, or a homologue thereof as described herein, and which confers after its expression enhancement of yield, in particular of a yield-related trait, e.g. NUE and/or increase of biomass production as compared to a corresponding, e.g. non-transformed, wild type plant.

[0552] It is advantageous to combine the above-described antisense strategy with a ribozyme method. Catalytic RNA molecules or ribozymes can be adapted to any target RNA and cleave the phosphodiester backbone at specific positions, thus functionally deactivating the target RNA (Tanner N. K., FEMS Microbiol. Rev. 23 (3), 257 (1999)). The ribozyme per se is not modified thereby, but is capable of cleaving further target RNA molecules in an analogous manner, thus acquiring the properties of an enzyme. The incorporation of ribozyme sequences into “antisense” RNAs imparts this enzyme-like RNA-cleaving property to precisely these “antisense” RNAs and thus increases their efficiency when inactivating the target RNA. The preparation and the use of suitable ribozyme “antisense” RNA molecules is described, for example, by Haseloff et al., (1988) Nature 33410, 585 (1988).

[0553] Further the antisense nucleic acid molecule of the invention can be also a ribozyme. Ribozymes are catalytic RNA molecules with ribonuclease activity, which are capable of cleaving a single-stranded nucleic acid, such as an mRNA, to which they have a complementary region. In this manner, ribozymes (for example “Hammerhead” ribozymes; Haselhoff and Gerlach, Nature 33410, 585 (1988)) can be used to catalytically cleave the mRNA of an enzyme to be suppressed and to prevent translation. The ribozyme technology can increase the efficacy of an antisense strategy. Methods for expressing ribozymes for reducing specific proteins are described in (EP 0 291 533, EP 0 321 201, EP 0 360 257). Ribozyme expression has also been described for plant cells (Steinecke P. et al., EMBO J. 11 (4), 1525 (1992); de Feyter R. et al., Mol. Gen. Genet. 250 (3), 329 (1996)). Suitable target sequences and ribozymes can be identified for example as described by Steinecke P., Ribozymes, Methods in Cell Biology 50, Galbraith et al. eds, Academic Press, Inc. (1995), pp. 449-460 by calculating the secondary structures of ribozyme RNA and target RNA and by their interaction (Bayley C. C. et al., Plant Mol. Biol. 18 (2), 353 (1992); Lloyd A. M. and Davis R. W. et al., Mol. Gen. Genet. 242 (6), 653 (1994)). For example, derivatives of the tetrahymena L-19 IVS RNA, which have complementary regions to the mRNA of the protein to be suppressed, can be constructed (see also U.S. Pat. No. 4,987,071 and U.S. Pat. No. 5,116,742). As an alternative, such ribozymes can also be identified from a library of a variety of ribozymes via a selection process (Bartel D. and Szostak J. W., Science 261, 1411 (1993)).

[0554] d) Introduction of a (sense) nucleic acid sequence for inducing cosuppression, e.g. for the reduction, repression or deletion of activity of the nucleic acid molecule or polypeptide which activity is to be reduced in the process of the invention, in particular of a nucleic acid molecule comprising a polynucleotide as depicted in column 5 or 7, of table I, application no. 1, or encoding a polypeptide comprising a polypeptide, a consensus sequence or a polypeptide motif as depicted in column 5 or 7 of table II or IV, application no. 1.

[0555] Accordingly, yet another embodiment of the invention is a coexpression construct, which confers—after being expressed in a suitable organism, e.g. a plant, or a part thereof—the reduction, repression, or deletion of an activity selected from the group consisting of: At1g74730-protein, At3g63270-protein, protein kinase, protein serine/threonine phosphatase, and SET domain-containing protein.

[0556] Yet another embodiments of the invention is a coexpression construct conferring the decline or inactivation of a molecule conferring the expression of a protein as shown in column 5 or 7 of table II, application no. 1, preferably as depicted in table II B, application no. 1, or comprising a consensus sequence or a polypeptide motif as shown in table IV, application no. 1, or being encoded by a nucleic acid molecule comprising a polynucleotide as depicted in column 5 or 7 of table I, application no. 1, preferably as depicted in table I B, application no. 1, or a homologue thereof as described herein , e.g. conferring the decline or inactivation of the nucleic acid molecule or the polypeptide of the invention, with the result that yield, in particular a yield-related trait, e.g. NUE and/or biomass production as compared to a corresponding, e.g. non-transformed, wild type plant are increased.

[0557] The expression of a nucleic acid sequence in sense orientation can lead to cosuppression of the corresponding homologous, endogenous genes. The expression of sense RNA with homology to an endogenous gene can reduce or indeed eliminate the expression of the endogenous gene, in a similar manner as has been described for the following antisense approaches: Jorgensen et al., Plant Mol. Biol. 31 (5), 957 (1996), Goring et al., Proc. Natl. Acad. Sci. USA 88, 1770 (1991), Smith et al., Mol. Gen. Genet. 224, 447 (1990), Napoli et al., Plant Cell 2, 279 (1990) or Van der Krol et al., Plant Cell 2, 291 (1990). In this context, the construct introduced may represent the homologous gene to be reduced either in full or only in part. The application of this technique to plants has been described for example by Napoli et al., The Plant Cell 2, (1990) and in U.S. Pat. No. 5,03410,323. Furthermore the above described cosuppression strategy can advantageously be combined with the RNAi method as described by Brummell et al., Plant J. 33, 793 (2003). At least in plants it is advantageously to use strong or very strong promoters in cosuppression approaches. Recent work for example by Schubert et al., (Plant Journal 16, 2561 (2004)) has indicated that cosuppression effects are dependent on a gene specific threshold level, above which cosuppression occurs.

[0558] e) Introduction of nucleic acid sequences encoding a dominant-negative protein, e.g. for the reduction or deletion of activity of the polypeptide which activity is reduced in the process of the invention, in particular of a polypeptide encoded by a nucleic acid molecule comprising a polynucleotide as depicted in column 5 or 7, of table I, application no. 1, or of a polypeptide comprising a polypeptide, or a consensus sequence or a polypeptide motif as depicted in column 5 or 7 of table II or IV application no. 1.

[0559] Accordingly, yet another embodiment of the invention is a dominant negative mutant, which confers—after being expressed in a suitable organism, e.g. a plant, or a part thereof—the reduction, repression, or deletion of an activity selected from the group consisting of At1g74730-protein, At3g63270-protein, protein kinase, protein serine/threonine phosphatase, and SET domain-containing protein.

[0560] Yet another embodiment of the invention is a dominate negative mutant conferring the decline or inactivation of a polypeptide conferring the expression of a protein as depicted in column 5 or 7 of table II, application no. 1, preferably as depicted in table II B, application no. 1, or of a polypeptide comprising a consensus sequence or a polypeptide motif as depicted in table IV, application no. 1, or being encoded by a nucleic acid molecule comprising a polynucleotide as depicted in column 5 or 7 of table I, application no. 1, preferably as depicted in table I B, application no. 1, or a homologue thereof as described herein, e.g. conferring the decline or inactivation of the nucleic acid molecule or the polypeptide of the invention, with the result that the yield, in particular a yield-related trait, e.g. NUE and/or the biomass production as compared to a corresponding, e.g. non-transformed, wild type plant are increased.

[0561] The function or activity of a protein can efficiently also be reduced by expressing a dominant-negative variant of said protein. The skilled worker is familiar with methods for reducing the function or activity of a protein by means of coexpression of its dominant-negative form (Lagna G. and Hemmati-Brivanlou A., Current Topics in Developmental Biology 36, 75 (1998); Perlmutter R. M. and Alberola-Ila J., Current Opinion in Immunology 8 (2), 285 (1996); Sheppard D., American Journal of Respiratory Cell & Molecular Biology 11 (1), 1 (1994); Herskowitz I., Nature 329 (6136), 219 (1987)).

[0562] A dominant-negative variant can be realized for example by changing of an amino acid of a polypeptide encoded by a nucleic acid molecule comprising a polynucleotide as depicted in column 5 or 7 of table I, application no. 1, or of a polypeptide comprising a polypeptide or a consensus sequence or a polypeptide motif as depicted in column 5 or 7 of table II or IV, application no. 1, or homologs thereof.

[0563] This change can be determined for example by computer-aided comparison (“alignment”). These mutations for achieving a dominant-negative variant are preferably carried out at the level of the nucleic acid sequences. A corresponding mutation can be performed for example by PCR-mediated in-vitro mutagenesis using suitable oligonucleotide primers by means of which the desired mutation is introduced. To this end, methods are used with which the skilled worker is familiar. For example, the “LA PCR in vitro Mutagenesis Kit” (Takara Shuzo, Kyoto) can be used for this purpose. It is also possible and known to those skilled in the art that deleting or changing of functional domains, e.g. TF or other signaling components which can bind but not activate may achieve the reduction of protein activity.

[0564] f) Introduction of DNA- or protein-binding factor against genes RNAs or proteins, e.g. for the reduction, repression or deletion of activity of the nucleic acid molecule or polypeptide which activity is reduced in the process of the invention, in particular of a nucleic acid molecule comprising a polynucleotide as depicted in column 5 or 7, of table I, application no. 1, or encoding a polypeptide comprising a polypeptide or a consensus sequence or a polypeptide motif as depicted in column 5 or 7 of table II or IV, application no. 1.

[0565] Accordingly, yet another embodiment of the invention is a DNA- or protein-binding factor against genes RNAs or proteins, which confers—after being expressed in a suitable organism, e.g. a plant, or a part thereof—the reduction, repression, or deletion of an activity selected from the group consisting of: At1g74730-protein, At3g63270-protein, protein kinase, protein serine/threonine phosphatase, and SET domain-containing protein.

[0566] Yet another embodiment of the invention is a DNA- or protein-binding factor against genes RNAs or proteins conferring the decline or inactivation of a molecule conferring the expression of a protein as depicted in column 5 or 7 of table II, preferably as depicted in table II B, application no. 1, or of a polypeptide comprising a consensus sequence or a polypeptide motif as depicted in table IV, application no. 1, or being encoded by a nucleic acid molecule comprising a polynucleotide as depicted in column 5 or 7 of table I, application no. 1, preferably as depicted in table I B, application no. 1, or a homologue thereof as described herein , e.g. conferring the decline or inactivation of the nucleic acid molecule or the polypeptide of the invention, with the result that the yield, in particular a yield-related trait, e.g. NUE and/or biomass production as compared to a corresponding, e.g. non-transformed, wild type plant are increased.

[0567] A reduction in the expression of a gene encoding the nucleic acid molecule or the polypeptide which activity is reduced in the process of the invention, in particular comprising a nucleic acid molecule comprising a polynucleotide as depicted in column 5 or 7 of table I, application no. 1, or encoding a polypeptide comprising a polypeptide, a consensus sequence or a polypeptide motif as depicted in column 5 or 7 of table II or IV, application no. 1, or homologs thereof according to the invention can also be achieved with specific DNA-binding factors, for example factors of the zinc finger transcription factor type. These factors attach to the genomic sequence of the endogenous target gene, preferably in the regulatory regions, and bring about repression of the endogenous gene. The use of such a method makes possible the reduction in the expression of an endogenous gene without it being necessary to recombinantly manipulate the sequence of the latter. Such methods for the preparation of relevant factors are described in Dreier B. et al., J. Biol. Chem. 276 (31), 29466 (2001) and J. Mol. Biol. 303 (4), 489 (2000), Beerli R. R. et al., Proc. Natl. Acad. Sci. USA 95 25), 14628 (1998); Proc. Natl. Acad. Sci. USA 97 (4), 1495 (2000) and J. Biol. Chem. 275 (42), 32617 (2000), Segal D. J. and Barbas C. F. 3rd, Curr. Opin. Chem. Biol. 4 (1), 3410 (2000), Kang J. S., and Kim J. S., J. Biol. Chem. 275 (12), 8742 (2000), Kim J. S. et al., Proc. Natl. Acad. Sci. USA 94 (8), 3616 (1997), Klug A., J. Mol. Biol. 293 (2), 215 (1999), Tsai S. Y. et al. Adv. Drug Deliv. Rev. 30 (1-3), 23 (1998), Mapp A. K. et al., Proc. Natl. Acad. Sci. USA 97 (8), 3930 (2000), Sharrocks A. D. et al., Int. J. Biochem. Cell Biol. 29(12), 1371 (1997) and Zhang L. et al., J. Biol. Chem. 275 43), 33850 (2000). Examples for the application of this technology in plants have been described in WO 01/52620, Ordiz M. I, et al., Proc. Natl. Acad. Sci. USA 99 (20), 13290 (2002)) or Guan et al., Proc. Natl. Acad. Sci. USA 99 (20), 13296 (2002)).

[0568] These factors can be selected using any portion of a gene. This segment is preferably located in the promoter region. For the purposes of gene suppression, however, it may also be located in the region of the coding exons or introns. The skilled worker can obtain the relevant segments from Genbank by database search or starting from a cDNA whose gene is not present in Genbank by screening a genomic library for corresponding genomic clones.

[0569] It is also possible to first identify sequences in a target crop, which encompass the nucleic acid molecule or which encode the polypeptide which activity is reduced in the process of the invention, in particular of a nucleic acid molecule comprising a polynucleotide as depicted in column 5 or 7 of table I B, application no. 1, or encoding a polypeptide comprising a polypeptide, a consensus sequence or a polypeptide motif as depicted in column 5 or 7 of table II B, application no. 1, or homologs thereof, then find the promoter and reduce expression by the use of the abovementioned factors.

[0570] The skilled worker is familiar with the methods required for doing so.

[0571] Furthermore, factors which are introduced into a cell may also be those which themselves inhibit the target protein. The protein-binding factors can, for example, be aptamers (Famulok M. and Mayer G., Curr. Top Microbiol. Immunol. 243, 123 (1999)) or antibodies or antibody fragments or single-chain antibodies. Obtaining these factors has been described, and the skilled worker is familiar therewith. For example, a cytoplasmic scFv antibody has been employed for modulating activity of the phytochrome A protein in genetically modified tobacco plants (Owen M. et al., Biotechnology (NY) 10 (7), 790 (1992);

[0572] Franken E. et al. Curr. Opin. Biotechnol. 8 (4), 411 (1997); Whitelam, Trend Plant Sci. 1, 286 (1996)).

[0573] Gene expression may also be suppressed by tailor-made low-molecular-weight synthetic compounds, for example of the polyamide type Dervan P. B. and Bürli R. W., Current Opinion in Chemical Biology 3, 688 (1999); Gottesfeld J. M. et al., Gene Expr. 9 (1-2), 77 (2000). These oligomers consist of the units 3-(dimethylamino)propylamine, N-methyl-3-hydroxypyrrole, N-methylimidazole and N-methylpyrroles; they can be adapted to each portion of double-stranded DNA in such a way that they bind sequence-specifically to the large groove and block the expression of the gene sequences located in this position. Suitable methods have been described in Bremer R. E. et al., Bioorg. Med. Chem. 9 (8), 2093 (2001), Ansari A. Z. et al.,) Chem. Biol. 8 (6), 583 (2001), Gottesfeld J. M. et al. J. Mol. Biol. 309 (3), 615 (2001), Wurtz N. R. et al., Org. Lett 3 (8), 1201 (2001), Wang C. C. et al., Bioorg. Med. Chem. 9 (3), 653 (2001), Urbach A. R. and Dervan P. B. Proc. Natl. Acad. Sci. USA 98 (8), 434103 (2001) and Chiang S. Y. et al., J. Biol. Chem. 275 (32), 24246 (2000).

[0574] g) Introduction of viral nucleic acid sequences and expression constructs which bring about the degradation of RNA, e.g. for the reduction, repression or deletion of activity of the nucleic acid molecule or polypeptide which activity is to be reduced in the process of the invention, in particular of a nucleic acid molecule comprising a polynucleotide as depicted in column 5 or 7 of table I, application no. 1, or encoding a polypeptide comprising a polypeptide, a consensus sequence or a polypeptide motif as depicted in column 5 or 7 of table II or IV, application no. 1.

[0575] Accordingly, yet another embodiment of the invention is a viral nucleic acid molecule, which confers—after being expressed in a suitable organism, e.g. a plant, or a part thereof—the reduction, repression, or deletion of an activity selected from the group consisting of At1g74730-protein, At3g63270-protein, protein kinase, protein serine/threonine phosphatase, and SET domain-containing protein.

[0576] Yet another embodiment of the invention is a viral nucleic acid molecule conferring the decline or inactivation of a RNA molecule conferring the expression of a protein as depicted in column 5 or 7 of table II, application no. 1, preferably as depicted in table II B, application no. 1, or a polypeptide comprising a consensus sequence or a polypeptide motif of table IV, application no. 1, or being encoded by a nucleic acid molecule comprising a polynucleotide as depicted in column 5 or 7 of table I, application no. 1, preferably as depicted in Table I B, application no. 1, or a homologue thereof as described herein , e.g. conferring the decline or inactivation of the nucleic acid molecule or the polypeptide of the invention, with the result that the yield, in particular a yield-related trait, e.g. NUE and/or the biomass production as compared to a corresponding, e.g. non-transformed, wild type plant are increased.

[0577] Inactivation or downregulation can also be efficiently brought about by inducing specific RNA degradation by the organism, advantageously in the plant, with the aid of a viral expression system (Amplikon) (Angell S. M. et al., Plant J. 20 (3), 357 (1999)). Nucleic acid sequences with homology to the transcripts to be suppressed are introduced into the plant by these systems—also referred to as “VIGS” (viral induced gene silencing) with the aid of viral vectors. Then, transcription is switched off, presumably mediated by plant defense mechanisms against viruses. Suitable techniques and methods are described in Ratcliff F. et al., Plant J. 25(2), 237 (2001), Fagard M. and Vaucheret H., Plant Mol. Biol. 43(2-3), 285 (2000), Anandalakshmi R. et al., Proc. Natl. Acad. Sci. USA 95 (22), 13079 (1998) and Ruiz M. T. Plant Cell 10 (6), 937 (1998).

[0578] h) Introduction of constructs for inducing a homologous recombination on endogenous genes, for example for generating knock-out mutants e.g. for the reduction, repression or deletion of activity of the nucleic acid molecule or polypeptide which activity is reduced in the process of the invention, in particular of a nucleic acid molecule comprising a polynucleotide as depicted in column 5 or 7 of table I, application no. 1, or encoding a polypeptide comprising a polypeptide, a consensus sequence or a polypeptide motif as depicted in column 5 or 7 of table II or IV, application no. 1.

[0579] Accordingly, yet another embodiment of the invention is a construct for inducing a homologous recombination on endogenous genes, which confers—after being introduced in a suitable organism, e.g. a plant, or a part thereof—the reduction, repression, or deletion of an activity selected from the group consisting of: At1g74730-protein, At3g63270-protein, protein kinase, protein serine/threonine phosphatase, and SET domain-containing protein.

[0580] Yet another embodiment of the invention is a construct for inducing homologous recombination on endogenous genes conferring the decline or inactivation of a molecule conferring the expression of a protein as depicted in column 5 or 7 of table II, application no. 1, preferably as depicted in table II B, application no. 1, or of a polypeptide comprising a consensus sequence or a polypeptide motif as depicted in table IV, application no. 1, or being encoded by a nucleic acid molecule comprising a polynucleotide as depicted in column 5 or 7 of table I, application no. 1, preferably as depicted in table I B, application no. 1, or a homologue thereof as described herein , e.g. conferring the decline or inactivation of the nucleic acid molecule or the polypeptide of the invention, with the result that the yield, in particular a yield-related trait, e.g. NUE and/or the biomass production as compared to a corresponding, e.g. non-transformed, wild type plant are increased.

[0581] To generate a homologously-recombinant organism with reduced activity, a nucleic acid construct is used which, for example, comprises at least part of an endogenous gene which is modified by a deletion, addition or substitution of at least one nucleotide in such a way that the functionality is reduced or completely eliminated. The modification may also affect the regulatory elements (for example the promoter) of the gene so that the coding sequence remains unmodified, but expression (transcription and/or translation) does not take place or is reduced.

[0582] In the case of conventional homologous recombination, the modified region is flanked at its 5′ and 3′ end by further nucleic acid sequences, which must be sufficiently long for allowing recombination. Their length is, as a rule, in a range of from one hundred bases up to several kilobases (Thomas K. R. and Capecchi M. R., Cell 51, 503 (1987); Strepp et al., Proc. Natl. Acad. Sci. USA 95 (8), 4368 (1998)). In the case of homologous recombination, the host organism—for example a plant—is transformed with the recombination construct using the methods described herein below, and clones, which have successfully undergone recombination are selected using for example a resistance to antibiotics or herbicides. Using the cotransformation technique, the resistance to antibiotics or herbicides can subsequently advantageously be re-eliminated by performing crosses. An example for an efficient homologous recombination system in plants has been published in Nat. Biotechnol. 20 (10), 1030 (2002) by Terada R et al.

[0583] Homologous recombination is a relatively rare event in higher eukaryotes, especially in plants. Random integrations into the host genome predominate. One possibility of removing the randomly integrated sequences and thus increasing the number of cell clones with a correct homologous recombination is the use of a sequence-specific recombination system as described in U.S. Pat. No. 6,110,736, by means of which unspecifically integrated sequences can be deleted again, which simplifies the selection of events which have integrated successfully via homologous recombination. A multiplicity of sequence-specific recombination systems may be used, examples which may be mentioned being Cre/lox system of bacteriophage P1, the FLP/FRT system from yeast, the Gin recombinase of phage Mu, the Pin recombinase from E. coli and the R/RS system of the pSR1 plasmid. The bacteriophage P1 Cre/lox system and the yeast FLP/FRT system are preferred. The FLP/FRT and the cre/lox recombinase system have already been applied to plant systems (Odell et al., Mol. Gen. Genet. 223, 369 (1990)).

[0584] i) Introduction of mutations into endogenous genes for bringing about a loss of function (for example generation of stop codons, reading-frame shifts and the like) e.g. for the reduction, repression or deletion of activity of the nucleic acid molecule or polypeptide which activity is reduced in the process of the invention, in particular of a nucleic acid molecule comprising a polynucleotide as depicted in column 5 or 7 of table I, application no. 1, or encoding a polypeptide comprising a polypeptide, a consensus sequence or a polypeptide motif as depicted in column 5 or 7 of table II or IV, application no. 1.

[0585] Accordingly, yet another embodiment of the invention is a mutated homologue of the nucleic acid molecule which activity is reduced in the process of the invention and, which confers—after being expressed in a suitable organism, e.g. a plant, or a part thereof—the reduction, repression, or deletion of an activity selected from the group consisting of At1g74730-protein, At3g63270-protein, protein kinase, protein serine/threonine phosphatase, and SET domain-containing protein.

[0586] Further suitable methods for reducing activity are the introduction of nonsense, deletion or integration mutations into endogenous genes, for example by introducing RNA/DNA oligonucleotides into the plant (Zhu et al., Nat. Biotechnol. 18 (5), 555 (2000)), and the generation of knock-out mutants with the aid of, for example, T-DNA mutagenesis (Koncz et al., Plant Mol. Biol. 20 (5), 963 (1992)), ENU-(N-ethyl-N-nitrosourea)mutagenesis or homologous recombination (Hohn B. and Puchta H., Proc. Natl. Acad. Sci. USA 96, 8321 (1999)). Point mutations may also be generated by means of DNA-RNA hybrids also known as “chimeraplasty” (Cole-Strauss et al., Nucl. Acids Res. 27 (5), 1323 (1999); Kmiec, Gene Therapy American Scientist 87 (3), 240 (1999)). The mutation sites may be specifically targeted or randomly selected. If the mutations have been created randomly e.g. by Transposon-Tagging or chemical mutagenesis, the skilled worked is able to specifically enrich selected mutation events in the inventive nucleic acids, especially by different PCR methods known to the person skilled in the art. Mutations can also be introduced by the introduction of so-called homing endonucleases which can be designed to set double strand breaks in specific sequences within the genome. The repair of said double strand breaks often leads to the desired non-functional mutations (Arnould et al., Journal of Molecular Biology 355 (3), 443 (2006)).

[0587] j) Introduction of a microRNA (or micro-RNA) that has been designed to target the gene of interest in order to induce a breakdown or translational inhibition of the mRNA of the gene of interest and thereby silence gene expression or of an expression cassette ensuring the expression of the former, e.g. for the reduction, repression or deletion of activity of the nucleic acid molecule or polypeptide which activity is reduced in the process of the invention, in particular of a nucleic acid molecule comprising a polynucleotide as depicted in column 5 or 7 of table I, application no. 1, or encoding a polypeptide comprising a polypeptide, a consensus sequence or a polypeptide motif as depicted in column 5 or 7 of table II or IV, application no. 1.

[0588] Accordingly, yet another embodiment of the invention is a miRNA molecule, which confers after being expressed in a suitable organism, e.g. a plant, or a part thereof—the reduction, repression, or deletion of an activity selected from the group consisting of At1g74730-protein, At3g63270-protein, protein kinase, protein serine/threonine phosphatase, and SET domain-containing protein.

[0589] Yet another embodiment of the invention is a miRNA molecule conferring the decline or inactivation of a molecule conferring the expression of a protein as depicted in column 5 or 7 of table II, application no. 1, preferably as depicted in table II B, application no. 1, or a polypeptide comprising a consensus sequence or a polypeptide motif as depicted in table IV, application no. 1, or being encoded by a nucleic acid molecule comprising a polynucleotide as depicted in column 5 or 7 of table I, application no. 1, preferably as depicted in table I B, application no. 1, or a homologue thereof as described herein , e.g. conferring the decline or inactivation of the nucleic acid molecule or the polypeptide of the invention, with the result that the yield, in particular a yield-related trait, e.g. NUE and/or the biomass production as compared to a corresponding, e.g. non-transformed, wild type plant are increased.

[0590] MicroRNAs (miRNAs) have emerged as evolutionarily conserved, RNA-based regulators of gene expression in plants and animals. mRNAs (˜21 to 25 nt) arise from larger precursors with a stem loop structure that are transcribed from non-protein-coding genes. miRNA targets a specific mRNA to suppress gene expression at post-transcriptional (i.e. degrades mRNA) or translational levels (i.e. inhibits protein synthesis) (Bartel D., Cell 116, 281 (2004)). mRNAs can be efficiently designed to specially target and down regulated selected genes. Determinants of target selection of natural plant miRNAs have been analysed by Schwab and coworkers (Schwab et al., Dev. Cell 8, 517 (2005)). This work has been extended to the design and use of artificial miRNAs (amiRNAs) to efficiently down regulate target genes, resulting in concepts and rules for the design of effective amiRNAs for directed gene silencing (Highly Specific Gene Silencing by Artificial microRNAs in Arabidopsis, Schwab et al., Plant Cell 18 (4), (2006)) and a web based tool for efficient amiRNA design (http://wmd.weigelworld.org).

[0591] k) Introduction of a transacting small interfering RNA (ta-siRNA) or of an expression cassette ensuring the expression of the former, e.g. for the reduction, repression or deletion of activity of the nucleic acid molecule or polypeptide which activity is reduced in the process of the invention, in particular of a nucleic acid molecule comprising a polynucleotide as depicted in column 5 or 7 of table I, application no. 1, or encoding a polypeptide comprising a polypeptide, a consensus sequence or a polypeptide motif as depicted in column 5 or 7 of table II or IV, application no. 1.

[0592] Accordingly, yet another embodiment of the invention is a ta-siRNA, which confers—after being expressed in a suitable organism, e.g. a plant, or a part thereof—the reduction, repression, or deletion of an activity selected from the group consisting of At1g74730-protein, At3g63270-protein, protein kinase, protein serine/threonine phosphatase, and SET domain-containing protein.

[0593] Yet another embodiment of the invention is a ta-siRNA conferring the decline or inactivation of a molecule conferring the expression of a protein as depicted in column 5 or 7 of table II, application no. 1, preferably as depicted in table II B, application no. 1, or a polypeptide comprising a consensus sequence or a polypeptide motif as depicted in table IV, application no. 1, or being encoded by a nucleic acid molecule comprising a polynucleotide as depicted in column 5 or 7 of table I, application no. 1, preferably as depicted in table I B, application no. 1, or a homologue thereof as described herein , e.g. conferring the decline or inactivation of the nucleic acid molecule or the polypeptide of the invention, with the result that the yield, in particular a yield-related trait, e.g. nitrogen use efficiency and/or the biomass production as compared to a corresponding, e.g. non-transformed, wild type plant are increased.

[0594] A transacting small interfering RNA (ta-siRNA) can be designed to target the gene of interest in order to induce a breakdown of the mRNA of the gene of interest and thereby silence gene expression.

[0595] Methods employing ta-siRNAs useful for the repression or inactivation of a gene product according to the process of the present invention are described in U.S. 60/672,976 and 60/718,645.

[0596] Nucleic acid sequences as described in item b) to k) are expressed in the cell or organism by transformation/transfection of the cell or organism or are introduced in the cell or organism by known methods, for example as disclosed in item a).

[0597] l) Identifying a non silent mutation, e.g. generation of stop codons, reading-frame shifts, integrations, inversions and the like in random mutagenized population according to different approaches like reverse screening or the so called TILLING (Targeting Induced Local Lesions IN Genomes) method, e.g. for the reduction, repression or deletion of activity of the nucleic acid molecule or polypeptide which activity is reduced in the process of the invention, in particular of a nucleic acid molecule comprising a polynucleotide as depicted in column 5 or 7 of Table I, application no. 1, or encoding a polypeptide comprising a polypeptide, a consensus sequence or a polypeptide motif, as depicted in column 5 or 7 of table II or IV application no. 1.

[0598] Accordingly, yet another embodiment of the invention is a TLLING or severse screening primer or a heteroduplex between a mutated DNA and a wild type DNA, which can be used to a identify mutation which confers—after being expressed in a suitable organism, e.g. a plant, or a part thereof—the reduction, repression, or deletion of an activity selected from the group consisting of At1g74730-protein, At3g63270-protein, protein kinase, protein serine/threonine phosphatase, and SET domain-containing protein.

[0599] Yet another embodiment of the invention is a TLLING or reverse screening primer for identifying a mutation conferring the decline or inactivation of a molecule conferring the expression of a protein as depicted in column 5 or 7 of table II, application no. 1, preferably as depicted in table II B, application no. 1, or of a polypeptide comprising a consensus sequence or a polypeptide motif as depicted in table IV, application no. 1, or being encoded by a nucleic acid molecule comprising a polynucleotide as depicted in column 5 or 7 of table I, application no. 1, preferably as depicted in table I B, application no. 1, or a homologue thereof as described herein , e.g. conferring the decline or inactivation of the nucleic acid molecule or the polypeptide of the invention, with the result that the yield, in particular a yield-related trait, e.g. nitrogen use efficiency and/or the biomass production as compared to a corresponding, e.g. non-transformed, wild type plant are increased.

[0600] Particular preferred is a TILLING or a reverse screening primer for the identification of a mutation in a nucleic acid molecule which is a homologue of a nucleic acid molecule as depicted in column 5 or 7 of table I, application no. 1, preferably as depicted in table I B, application no. 1, such as a nucleic acid molecule comprising a nucleic acid molecule as depicted in column 5 or 7 of table I, application no. 1, preferably as depicted in table I B, application no. 1, but which is mutated in one or more nucleotides.

[0601] In one embodiment, the TILLING or reverse screening primer comprises a fragment of at least 17 nucleotides (nt), preferably of 18, 19, 20, 21, 22, 23, 24, 25, 27, 30 nt of a nucleic acid molecule as depicted in column 5 or 7 of table I, application no. 1, preferably as depicted in table I B, application no. 1.

[0602] In one embodiment, the TILLING or reverse screening primer comprises a fragment of at least 17 nucleotides (nt), preferably of 18, 19, 20, 21, 22, 23, 24, 25, 27, 30 nt and which is at least 70%, 75%, 80%, 90%, more preferred at least 95%, most preferred 100% homologue to a nucleic acid molecule as depicted in column 5 or 7 of table I, application no. 1, preferably as depicted in table I B, application no. 1.

[0603] For the TILLING, mutations are induced by treatment with a chemical mutagen (EMS). DNAs are prepared from individuals and arrayed in pools for initial screening. These pools become templates for PCR using primers that amplify a region of interest. Heteroduplexes are formed between wild-type and mutant fragments in the pool by denaturing and reannealing PCR products. These heteroduplexes are the substrate for cleavage by the nuclease CEL I. After digestion, the resulting products are visualized using standard fluorescent sequencing slab gel electrophoresis. Positive pools are then rescreened as individual DNAs, thus identifying the mutant plant and the approximate position of the mutation along the sequence. This positional information increases the efficiency of sequence analysis, as heterozygous mutations may be otherwise difficult to identify.

[0604] High-throughput TILLING is for example described in Colbert et al., Plant Physiology 126, 480 (2001) and has recently been applied to crops (reviewed in Slade and Knauf, Trans-genic Res. 14 (2), 109 (2005)).

[0605] Other reverse screening methods aims to identify individuals in populations, mutated through the random integration of nucleic acids, like transposons or T-DNAs have been described severals times, eg. Krysan et al., Plant Cell 11, 2283 (1999); Sessions et al., Plant Cell 14, 2985 (2002); Young et al., Plant Physiol. 125, 513 (2001); Koprek et al., Plant J. 24, 253 (2000); Jeon et al., Plant J. 22, 561 (2000); Tissier et al., Plant Cell 11, 1841 (1999); Speulmann et al., Plant Cell 11, 1853 (1999).

[0606] In one further embodiment of the process according to the invention, organisms are used in which one of the abovementioned genes, or one of the above-mentioned nucleic acids, is mutated in such a manner that the activity of the encoded gene products is influenced by cellular factors to a greater extent than in the reference organism, as compared with the unmutated proteins. This kind of mutation could lead to a change in the metabolic activity of the organism, which than causes in an enhanced yield, in particular a yield-related trait, e.g. nitrogen use efficiency and/or higher biomass production as compared to a corresponding, e.g. non-transformed, wild type plant. The reason for this higher productivity can be due to a change in regulation mechanism of enzymic activity such as substrate inhibition or feed back regulation. In a further embodiment the process according to the invention, organisms are grown under such conditions, that the expression of the nucleic acids of the invention is reduced or repressed leading to an enhanced yield, in particular a yield-related trait, e.g. nitrogen use efficiency and/or higher biomass production as compared to a corresponding, e.g. non-transformed, wild type plant according to the invention.

[0607] In one embodiment the enhancement of yield, in particular a yield-related trait, e.g. nitrogen use efficiency and/or the biomass production as compared to a corresponding, e.g. non-transformed, wild type plant or part thereof can be increased by targeted or random mutagenesis of the endogenous genes comprising or encoding the molecule which activity is to be reduced in the process of the invention, e.g. comprising a polynucleotide as depicted in column 5 or 7 of table I, application no. 1, or encoding an polypeptide comprising a polypeptide, a consensus sequence or a polypeptide motif as depicted in column 5 or 7 of table II or IV, application no. 1.

[0608] For example homologous recombination can be used to either introduce negative regulatory elements or to remove, interrupt or delete enhancer elements form regulatory regions. In addition gene conversion like methods described by Kochevenko and Willmitzer (Plant Physiol. 132 (1), 174 (2003)) and citations therein may be modified to disrupt enhancer elements or to enhance to activity of negative regulatory elements. Furthermore mutations or repressing elements can be randomly introduced in (plant) genomes by T-DNA or transposon mutagenesis and lines can be screened for, in which repressing or interrupting elements have be integrated near to a gene of the invention, the expression of which is thereby repressed, reduced or deleted. The inactivation of plant genes by random integrations of enhancer elements has been described.

[0609] Reverse genetic strategies to identify insertions (which eventually carrying the inactivation elements) near in genes of interest have been described for various cases e.g. Krysan et al., Plant Cell 11, 2283 (1999); Sessions et al Plant Cell 14, 2985 (2002); Young et al., Plant Physiol. 125, 513 (2001); Koprek et al., Plant J. 24, 253 (2000); Jeon et al., Plant J. 22, 561 (2000); Tissier et al., Plant Cell 11, 1841 (1999); Speulmann et al., Plant Cell 11, 1853 (1999).

[0610] The enhancement of negative regulatory elements or the disruption or weaking of enhancing or activating regulatory elements can also be achieved through common mutagenesis techniques: The production of chemically or radiation mutated populations is a common technique and known to the skilled worker.

[0611] Accordingly, the expression level can be increased if the endogenous genes encoding a polypeptide or a nucleic acid molecule conferring the activity described herein, in particular genes comprising the nucleic acid molecule of the present invention, are modified by a mutagenesis approach via homologous recombination with optional identification by TILLING or other reverse screening approaches, or gene conversion.

[0612] In one embodiment of the invention, the applicable modification of the nucleic acid molecules described herein for the use in the process of the invention, i.e. the reduction, repression or deletion of its activity and being itself encoded by the host organism can for example be achieved by random mutagenesis with chemicals, radiation or UV-light or side directed mutagenesis in such a manner that the yield, in particular a yield-related trait, e.g. nitrogen use efficiency and/or the biomass production as compared to a corresponding, e.g. non-transformed, wild type plant are increased. This embodiment of the invention shall be deemed as transgenic in the sense of the invention.

[0613] Using the herein mentioned cloning vectors and transformation methods such as those which are published and cited in: Plant Molecular Biology and Biotechnology (CRC Press, Boca Raton, Fla.), chapter 6/7, pp. 71-119 (1993); F. F. White, Vectors for Gene Transfer in Higher Plants; in: Transgenic Plants, vol. 1, Engineering and Utilization, Ed.: Kung and R. Wu, Academic Press, 1993, 15-38; B. Jenes et al., Techniques for Gene Transfer, in: Transgenic Plants, vol. 1, Engineering and Utilization, Ed.: Kung and R. Wu, Academic Press (1993), 128-143; Potrykus, Annu. Rev. Plant Physiol. Plant Molec. Biol. 42, 205-225 (1991) and further cited below, nucleic acid molecule derived from the polynulceotides described herein for the use in the process of the invention as described herein may be used for the recombinant modification of a wide range of organisms, in particular plants, so that they become a better and more efficient due to the deletion or reduction the activity of genes comprising nucleic acid molecule of the invention or of the expression product of said genes according to the process of the invention.

[0614] The enhancement of yield, in particular a yield-related trait, e.g. nitrogen use efficiency and/or the improved biomass production as compared to a corresponding, e.g. non-transformed, wild type plant can be brought about by a direct effect of the manipulation or by an indirect effect of this manipulation.

[0615] In order to improve the introduction of a nucleic acid molecule for reduction, repression, decrease or deletion of the expression or activity of the molecules to be reduced in the process of the invention in an organisms, the nucleic acid molecules disclosed herein or derivates thereof can be incorporated into a nucleic acid construct and/or a vector in such a manner that their introduction into an organism, e.g. a cell, confers an reduced or deleted endogenous or cellulary activity either on the nucleic acid sequence expression level or on the level of the polypeptide encoded by said sequences.

[0616] Accordingly, in order to improve the introduction of a nucleic acid molecule and to confer or improve the reduction, repression, decrease or deletion of the expression or activity of the molecules to be reduced in the process of the invention in an organisms, e.g. in a trans-genic plant or microorganism nucleic acid molecules encoding the herein disclosed antisense nucleic acid molecule, RNAi, snRNA, dsRNA, siRNA, miRNA, ta-siRNA, cosuppression molecule, ribozyme, antibodies or other molecule inhibiting the expression or activity of an expression product of the nucleic acid molecule to be reduced, repressed or deleted in the process of the invention can be incorporated into a nucleic acid construct and/or a vector.

[0617] After the above-described reducing, repressing, decreasing or deleting (which as defined above also encompasses the generating of an activity in an organism, i.e. a de novo activity), for example after the introduction and the expression of the RNAi, snRNA, dsRNA, siRNA, miRNA, ta-siRNA, cosuppression molecule, ribozyme, antibody or antisense molecule or ribozyme or other molecule inhibiting the expression or activity, as described in the methods or processes according to the invention, the organism according to the invention, advantageously, a plant, plant tissue or plant cell, is grown and subsequently harvested.

[0618] Examples can be transgenic or non-transgenic plants, cells or protoplasts thereof. Examples of preferred suitable organisms are described in the following paragraphs.

[0619] Suitable host organisms (transgenic organism) for generating the nucleic acid molecule used according to the invention or for the use in the process of the invention, e.g. to be transformed with the nucleic acid construct or the vector (both as described below) of the invention, e.g. conferring the expression of an RNAi, snRNA, dsRNA, siRNA, miRNA, ta-siRNA, ribozyme, or antisense molecule or ribozyme or an other molecule inhibiting the expression or activity, are, in principle, all plants which are suitable for the repression, reduction or deletion of genes, in particular of a nucleic acid molecule comprising a polynucleotide as depicted in column 5 or 7, of table I, application no. 1, or encoding a polypeptide comprising a polypeptide, a consensus sequence or a polypeptide motif as depicted in column 5 or 7 of table II or IV, application no. 1.

[0620] In the event that the (transgenic) host organism is a plant, plant tissue or plant cell, such plants are selected from the group consisting of the families Anacardiaceae, Asteraceae, Apiaceae, Betulaceae, Boraginaceae, Brassicaceae, Bromeliaceae, Caricaceae, Cannabaceae, Convolvulaceae, Chenopodiaceae, Cucurbitaceae, Elaeagnaceae, Ericaceae, Euphorbiaceae, Fabaceae, Geraniaceae, Gramineae, Juglandaceae, Lauraceae, Leguminosae, Linaceae or perennial grass, fodder crops, vegetables, ornamentals and Arabidopsis thaliana, this plant is for example either grown on a solid medium or as cells in an, e.g. liquid, medium, which is known to the skilled worker and suits the organism. Furthermore such plants can be grown in soil or therelike.

[0621] In one embodiment, the nucleic acid molecule used in the process of the invention, in particular the nucleic acid molecule of the invention, or the production or source organism is or originates from a plant, such as a plant selected from the families Aceraceae, Anacardiaceae, Apiaceae, Asteraceae, Brassicaceae, Cactaceae, Cucurbitaceae, Euphorbiaceae, Fabaceae, Malvaceae, Nymphaeaceae, Papaveraceae, Rosaceae, Salicaceae, Solanaceae, Arecaceae, Bromeliaceae, Cyperaceae, Iridaceae, Liliaceae, Orchidaceae, Gentianaceae, Labiaceae, Magnoliaceae, Ranunculaceae, Carifolaceae, Rubiaceae, Scrophulariaceae, Caryophyllaceae, Ericaceae, Polygonaceae, Violaceae, Juncaceae or Poaceae and preferably from a plant selected from the group of the families Apiaceae, Asteraceae, Brassicaceae, Cucurbitaceae, Fabaceae, Papaveraceae, Rosaceae, Solanaceae, Liliaceae or Poaceae.

[0622] Preferred plants are selected from the group consisting of Anacardiaceae such as the genera Pistacia, Mangifera, Anacardium e.g. the species Pistacia vera [pistachios, Pistazie], Mangifer indica [Mango] or Anacardium occidentale [Cashew]; Asteraceae such as the genera Calendula, Carthamus, Centaurea, Cichorium, Cynara, Helianthus, Lactuca, Locusta, Tagetes, Valeriana e.g. the species Calendula officinalis [Marigold], Carthamus tinctorius [safflower], Centaurea cyanus [cornflower], Cichorium intybus [blue daisy], Cynara scolymus [Artichoke], Helianthus annus [sunflower], Lactuca sativa, Lactuca crispa, Lactuca esculenta, Lactuca scariola L. ssp. sativa, Lactuca scariola L. var. integrate, Lactuca scariola L. var. integrifolia, Lactuca sativa subsp. romana, Locusta communis, Valeriana locusta [lettuce], Tagetes lucida, Tagetes erecta or Tagetes tenuifolia [Marigold]; Apiaceae such as the genera Daucus e.g. the species Daucus carota [carrot]; Betulaceae such as the genera Corylus e.g. the species Corylus avellana or Corylus colurna [hazelnut]; Boraginaceae such as the genera Borago e.g. the species Borago officinalis [borage]; Brassicaceae such as the genera Brassica, Melanosinapis, Sinapis, Arabidopsis e.g. the species Brassica napus, Brassica rapa ssp. [canola, oilseed rape, turnip rape], Sinapis arvensis Brassica juncea, Brassica juncea var. juncea, Brassica juncea var. crispifolia, Brassica juncea var. foliosa, Brassica nigra, Brassica sinapioides, Melanosinapis communis [mustard], Brassica oleracea [fodder beet] or Arabidopsis thaliana; Bromeliaceae such as the genera Anana, Bromelia e.g. the species Anana comosus, Ananas ananas or Bromelia comosa [pineapple]; Caricaceae such as the genera Carica e.g. the species Carica papaya [papaya]; Cannabaceae such as the genera Cannabis e.g. the species Cannabis sative [hemp], Convolvulaceae such as the genera Ipomea, Convolvulus e.g. the species Ipomoea batatus, Ipomoea pandurata, Convolvulus batatas, Convolvulus tiliaceus, Ipomoea fastigiate, Ipomoea tiliacea, Ipomoea triloba or Convolvulus panduratus [sweet potato, Man of the Earth, wild potato], Chenopodiaceae such as the genera Beta, i.e. the species Beta vulgaris, Beta vulgaris var. altissima, Beta vulgaris var. Vulgaris, Beta maritima, Beta vulgaris var. perennis, Beta vulgaris var. conditiva or Beta vulgaris var. esculenta [sugar beet]; Cucurbitaceae such as the genera Cucubita e.g. the species Cucurbita maxima, Cucurbita mixta, Cucurbita pepo or Cucurbita moschata [pumpkin, squash]; Elaeagnaceae such as the genera Elaeagnus e.g. the species Olea europaea [olive]; Ericaceae such as the genera Kalmia e.g. the species Kalmia latifolia, Kalmia angustifolia, Kalmia microphylla, Kalmia polifolia, Kalmia occidentalis, Cistus chamaerhodendros or Kalmia lucida [American laurel, broad-leafed laurel, calico bush, spoon wood, sheep laurel, alpine laurel, bog laurel, western bog-laurel, swamp-laurel]; Euphorbiaceae such as the genera Manihot, Janipha, Jatropha, Ricinus e.g. the species Manihot utilissima, Janipha manihot, Jatropha manihot, Manihot aipil, Manihot dulcis, Manihot manihot, Manihot melanobasis, Manihot esculenta [manihot, arrowroot, tapioca, cassaya] or Ricinus communis [castor bean, Castor Oil Bush, Castor Oil Plant, Palma Christi, Wonder Tree]; Fabaceae such as the genera Pisum, Albizia, Cathormion, Feuillea, Inga, Pithecolobium, Acacia, Mimosa, Medicajo, Glycine, Dolichos, Phaseolus, Soja e.g. the species Pisum sativum, Pisum arvense, Pisum humile [pea], Albizia berteriana, Albizia julibrissin, Albizia lebbeck, Acacia berteriana, Acacia littoralis, Albizia berteriana, Albizzia berteriana, Cathormion berteriana, Feuillea berteriana, Inga fragrans, Pithecellobium berterianum, Pithecellobium fragrans, Pithecolobium berterianum, Pseudalbizzia berteriana, Acacia julibrissin, Acacia nemu, Albizia nemu, Feuilleea julibrissin, Mimosa julibrissin, Mimosa speciosa, Sericanrda julibrissin, Acacia lebbeck, Acacia macrophylla, Albizia lebbek, Feuilleea lebbeck, Mimosa lebbeck, Mimosa speciosa [bastard logwood, silk tree, East Indian Walnut], Medicago sativa, Medicago falcata, Medicago varia [alfalfa] Glycine max, Dolichos soja, Glycine gracilis, Glycine hispida, Phaseolus max, Soja hispida or Soja max [soybean]; Geraniaceae such as the genera Pelargonium, Cocos, Oleum e.g. the species Cocos nucifera, Pelargonium grossularioides or Oleum cocois [coconut]; Gramineae such as the genera Saccharum e.g. the species Saccharum officinarum; Juglandaceae such as the genera Juglans, Wallia e.g. the species Juglans regia, Juglans ailanthifolia, Juglans sieboldiana, Juglans cinerea, Wallia cinerea, Juglans bixbyi, Juglans californica, Juglans hindsii, Juglans intermedia, Juglans jamaicensis, Juglans major, Juglans microcarpa, Juglans nigra or Wallia nigra [walnut, black walnut, common walnut, Persian walnut, white walnut, butternut, black walnut]; Lauraceae such as the genera Persea, Laurus e.g. the species laurel Laurus nobilis [bay, laurel, bay laurel, sweet bay], Persea americana Persea americana, Persea gratissima or Persea persea [avocado]; Leguminosae such as the genera Arachis e.g. the species Arachis hypogaea [peanut]; Linaceae such as the genera Linum, Adenolinum e.g. the species Linum usitatissimum, Linum humile, Linum austriacum, Linum bienne, Linum angustifolium, Linum catharticum, Linum flavum, Linum grandiflorum, Adenolinum grandiflorum, Linum lewisii, Linum narbonense, Linum perenne, Linum perenne var. lewisii, Linum pratense or Linum trigynum [flax, linseed]; Lythrarieae such as the genera Punica e.g. the species Punica granatum [pomegranate]; Malvaceae such as the genera Gossypium e.g. the species Gossypium hirsutum, Gossypium arboreum, Gossypium barbadense, Gossypium herbaceum or Gossypium thurberi [cotton]; Musaceae such as the genera Musa e.g. the species Musa nana, Musa acuminata, Musa paradisiaca, Musa spp. [banana]; Onagraceae such as the genera Camissonia, Oenothera e.g. the species Oenothera biennis or Camissonia brevipes [primrose, evening primrose]; Palmae such as the genera Elacis e.g. the species Elaeis guineensis [oil plam]; Papaveraceae such as the genera Papaver e.g. the species Papaver orientale, Papaver rhoeas, Papaver dubium [poppy, oriental poppy, corn poppy, field poppy, shirley poppies, field poppy, long-headed poppy, long-pod poppy]; Pedaliaceae such as the genera Sesamum e.g. the species Sesamum indicum [sesame]; Piperaceae such as the genera Piper, Artanthe, Peperomia, Steffensia e.g. the species Piper aduncum, Piper amalago, Piper angustifolium, Piper auritum, Piper betel, Piper cubeba, Piper longum, Piper nigrum, Piper retrofractum, Artanthe adunca, Artanthe elongata, Peperomia elongata, Piper elongatum, Steffensia elongata. [Cayenne pepper, wild pepper]; Poaceae such as the genera Hordeum, Secale, Avena, Sorghum, Andropogon, Holcus, Panicum, Oryza, Zea, Triticum e.g. the species Hordeum vulgare, Hordeum jubatum, Hordeum murinum, Hordeum secalinum, Hordeum distichon Hordeum aegiceras, Hordeum hexastichon, Hordeum hexastichum, Hordeum irregulare, Hordeum sativum, Hordeum secalinum [barley, pearl barley, foxtail barley, wall barley, meadow barley], Secale cereale [rye], Avena sativa, Avena fatua, Avena byzantina, Avena fatua var. sativa, Avena hybrida [oat], Sorghum bicolor, Sorghum halepense, Sorghum saccharatum, Sorghum vulgare, Andropogon drummondii, Holcus bicolor, Holcus sorghum, Sorghum aethiopicum, Sorghum arundinaceum, Sorghum caffrorum, Sorghum cernuum, Sorghum dochna, Sorghum drummondii, Sorghum durra, Sorghum guineense, Sorghum lanceolatum, Sorghum nervosum, Sorghum saccharatum, Sorghum subglabrescens, Sorghum verticilliflorum, Sorghum vulgare, Holcus halepensis, Sorghum miliaceum millet, Panicum militaceum [Sorghum, millet], Oryza sativa, Oryza latifolia [rice], Zea mays [corn, maize] Triticum aestivum, Triticum durum, Triticum turgidum, Triticum hybernum, Triticum macha, Triticum sativum or Triticum vulgare [wheat, bread wheat, common wheat], Proteaceae such as the genera Macadamia e.g. the species Macadamia intergrifolia [macadamia]; Rubiaceae such as the genera Coffea e.g. the species Cofea spp., Coffea arabica, Coffea canephora or Coffea liberica [coffee]; Scrophulariaceae such as the genera Verbascum e.g. the species Verbascum blattaria, Verbascum chaixii, Verbascum densiflorum, Verbascum lagurus, Verbascum longifolium, Verbascum lychnitis, Verbascum nigrum, Verbascum olympicum, Verbascum phlomoides, Verbascum phoenicum, Verbascum pulverulentum or Verbascum thapsus [mullein, white moth mullein, nettle-leaved mullein, dense-flowered mullein, silver mullein, long-leaved mullein, white mullein, dark mullein, greek mullein, orange mullein, purple mullein, hoary mullein, great mullein]; Solanaceae such as the genera Capsicum, Nicotiana, Solanum, Lycopersicon e.g. the species Capsicum annuum, Capsicum annuum var. glabriusculum, Capsicum frutescens [pepper], Capsicum annuum [paprika], Nicotiana tabacum, Nicotiana alata, Nicotiana attenuata, Nicotiana glauca, Nicotiana langsdorffii, Nicotiana obtusifolia, Nicotiana quadrivalvis, Nicotiana repanda, Nicotiana rustica, Nicotiana sylvestris [tobacco], Solanum tuberosum [potato], Solanum melongena [egg-plant] (Lycopersicon esculentum, Lycopersicon lycopersicum, Lycopersicon pyriforme, Solanum integrifolium or Solanum lycopersicum [tomato]; Sterculiaceae such as the genera Theobroma e.g. the species Theobroma cacao [cacao]; Theaceae such as the genera Camellia e.g. the species Camellia sinensis) [tea].

[0623] All abovementioned host organisms are also useable as source organisms for the nucleic acid molecule used in the process of the invention, e.g. the nucleic acid molecule of the invention.

[0624] Preferred are crop plants and in particular plants mentioned herein as host plants such as the families and genera mentioned above for example preferred the species Anacardium occidentale, Calendula officinalis, Carthamus tinctorius, Cichorium intybus, Cynara scolymus, Helianthus annus, Tagetes lucida, Tagetes erecta, Tagetes tenuifolia; Daucus carota; Corylus avellana, Corylus colurna, Borago officinalis; Brassica napus, Brassica rapa ssp., Sinapis arvensis, Brassica juncea, Brassica juncea var. juncea, Brassica juncea var. crispifolia, Brassica juncea var. foliosa, Brassica nigra, Brassica sinapioides, Melanosinapis communis, Brassica oleracea, Arabidopsis thaliana, Anana comosus, Ananas ananas, Bromelia comosa, Carica papaya, Cannabis sative, Ipomoea batatus, Ipomoea pandurata, Convolvulus batatas, Convolvulus tiliaceus, Ipomoea fastigiata, Ipomoea tiliacea, Ipomoea triloba, Convolvulus panduratus, Beta vulgaris, Beta vulgaris var. altissima, Beta vulgaris var. vulgaris, Beta maritima, Beta vulgaris var. perennis, Beta vulgarisvar. conditiva, Beta vulgaris var. esculenta, Cucurbita maxima, Cucurbita mixta, Cucurbita pepo, Cucurbita moschata, Olea europaea, Manihot utilissima, Janipha manihot, Jatropha manihot, Manihot aipil, Manihot dulcis, Manihot manihot, Manihot melanobasis, Manihot esculenta, Ricinus communis, Pisum sativum, Pisum arvense, Pisum humile, Medicago sativa, Medicago falcata, Medicago varia, Glycine max, Dolichos soja, Glycine gracilis, Glycine hispida, Phaseolus max, Soja hispida, Soja max, Cocos nucifera, Pelargonium grossularioides, Oleum cocoas, Laurus nobilis, Persea americana, Arachis hypogaea, Linum usitatissimum, Linum humile, Linum austriacum, Linum bienne, Linum angustifolium, Linum catharticum, Linum flavum, Linum grandiflorum, Adenolinum grandiflorum, Linum lewisii, Linum narbonense, Linum perenne, Linum perenne var. lewisii, Linum pratense, Linum trigynum, Punica granatum, Gossypium hirsutum, Gossypium arboreum, Gossypium barbadense, Gossypium herbaceum, Gossypium thurberi, Musa nana, Musa acuminata, Musa paradisiaca, Musa spp., Elaeis guineensis, Papaver orientale, Papaver rhoeas, Papaver dubium, Sesamum indicum, Piper aduncum, Piper amalago, Piper angustifolium, Piper auritum, Piper betel, Piper cubeba, Piper longum, Piper nigrum, Piper retrofractum, Artanthe adunca, Artanthe elongata, Peperomia elongata, Piper elongatum, Steffensia elongata, Hordeum vulgare, Hordeum jubatum, Hordeum murinum, Hordeum secalinum, Hordeum distichon Hordeum aegiceras, Hordeum hexastichon, Hordeum hexastichum, Hordeum irregulare, Hordeum sativum, Hordeum secalinum, Avena sativa, Avena fatua, Avena byzantina, Avena fatua var. sativa, Avena hybrida, Sorghum bicolor, Sorghum halepense, Sorghum saccharatum, Sorghum vulgare, Andropogon drummondii, Holcus bicolor, Holcus sorghum, Sorghum aethiopicum, Sorghum arundinaceum, Sorghum caffrorum, Sorghum cernuum, Sorghum dochna, Sorghum drummondii, Sorghum durra, Sorghum guineense, Sorghum lanceolatum, Sorghum nervosum, Sorghum saccharatum, Sorghum subglabrescens, Sorghum verticilliflorum, Sorghum vulgare, Holcus halepensis, Sorghum miliaceum millet, Panicum militaceum, Oryza sativa, Oryza latifolia, Zea mays, Triticum aestivum, Triticum durum, Triticum turgidum, Triticum hybernum, Triticum macha, Triticum sativum or Triticum vulgare, Cofea spp., Coffea arabica, Coffea canephora, Coffea liberica, Capsicum annuum, Capsicum annuum var. glabriusculum, Capsicum frutescens, Capsicum annuum, Nicotiana tabacum, Solanum tuberosum, Solanum melongena, Lycopersicon esculentum, Lycopersicon lycopersicum, Lycopersicon pyriforme, Solanum integrifolium, Solanum lycopersicum, Theobroma cacao or Camellia sinensis.

[0625] Particular preferred plants are plants selected from the group consisting of maize, soja, canola, wheat, barley, triticale, rice, linseed, sunflower, hemp, borage, oil palm, coconut, evening primrose, peanut, sunflower, potato and Arabidopsis.

[0626] Other preferred plants are a non-transformed from plants selected from the group consisting of rye, oat, soybean, cotton, rapeseed, manihot, pepper, sugar cane, sunflower, flax, safflower, primrose, rapeseed, turnip rape, tagetes, solanaceous plants, tobacco, eggplant, tomato, Vicia species, pea, alfalfa, coffee, cacao, tea, Salix species, perennial grass and forage crops.

[0627] More preferred plants are a non-transformed Linum plant cell, preferably Linum usitatissimum, more preferably the variety Brigitta, Golda, Gold Merchant, Helle, Juliel, Olpina, Livia, Marlin, Maedgold, Sporpion, Serenade, Linus, Taunus, Lifax or Liviola, a non-transformed Heliantus plant cell, preferably Heliantus annuus, more preferably the variety Aurasol, Capella, Flavia, Flores, Jazzy, Palulo, Pegasol, PIR64A54, Rigasol, Sariuca, Sideral, Sunny, Alenka, Candisol or Floyd, or a non-transformed Brassica plant cell, preferably Brassica napus, more preferably the variety Dorothy, Evita, Heros, Hyola, Kimbar, Lambada, Licolly, Liconira, Licosmos, Lisonne, Mistral, Passat, Serator, Siapula, Sponsor, Star, Caviar, Hybridol, Baical, Olga, Lara, Doublol, Karola, Falcon, Spirit, Olymp, Zeus, Libero, Kyola, Licord, Lion, Lirajet, Lisbeth, Magnum, Maja, Mendel, Mica, Mohican, Olpop, Ontarion, Panthar, Prinoe, Pronio, Susanna, Talani, Titan, Transfer, Wiking, Woltan, Zeniah, Artus, Contact or Smart.

[0628] In one embodiment of the invention transgenic plants are selected from the group comprising corn, soy, oil seed rape (including canola and winter oil seed reap), cotton, wheat and rice.

[0629] All abovementioned host plants are also useable as source organisms for isolation or identification of the nucleic acid molecule or polypeptide which activity is to be reduced in the process of the invention or of a functional equivalent thereof. Maize, soja, canola, hemp, borage, oil palm, coconut, evening primrose, peanut, sunflower, wheat, barley, triticale, rice, linseed, sunflower, potato and Arabidopsis are preferred source plants.

[0630] yield, in particular a yield-related trait, e.g. nitrogen use efficiency and/or biomass production corresponding, e.g. non-transformed, wild type in a plant used in the process of the invention may be increased according to the process of the invention by at least a factor of 1.05, 1.1, preferably at least a factor of 1.5; 2, 3, 4 or 5, especially preferably by at least a factor of 10, 15, 20 or 30, very especially preferably by at least a factor of 50, in comparison with the wild type, control or reference.

[0631] In a preferred embodiment, the present invention relates to a process for enhancing the yield, in particular a yield-related trait, e.g. nitrogen use efficiency and/or increasing the biomass production as compared to a corresponding, e.g. non-transformed, wild type plant comprising the reducing, repressing, decreasing or deleting of the activity of a nucleic acid molecule comprising a polynucleotide having the nucleotide sequence as depicted in column 5 or 7 of table I, application no. 1, or of a homolog thereof or comprising the reducing, repressing, decreasing or deleting of the activity of a polypeptide comprising a polypeptide having the amino acid sequence as depicted in column 5 or 7 of table II, application no. 1, or comprising a consensus sequence or a polypeptide motif as depicted in column 7 of table IV, application no. 1, or of a homolog thereof as described herein.

[0632] Accordingly, in another preferred embodiment, the present invention relates to a process for for enhancing the yield, in particular a yield-related trait, e.g. nitrogen use efficiency and/or increasing the biomass production as compared to a corresponding, e.g. non-transformed, wild type plant comprising reducing, repressing, decreasing or deleting the activity or expression of at least one nucleic acid molecule, comprising a nucleic acid molecule which is selected from the group consisting of:
[0633] (a) an isolated nucleic acid molecule encoding the polypeptide as depicted in column 5 or 7 of table II, application no. 1, or comprising a consensus sequence or polypeptide motif as depicted in column 7 of table IV, application no. 1;
[0634] (b) an isolated nucleic acid molecule as depicted in column 5 or 7 of table I, application no. 1,
[0635] (c) an isolated nucleic acid molecule, which, as a result of the degeneracy of the genetic code, can be derived from a polypeptide sequence as depicted in column 5 or 7 of table II or comprising a consensus sequence or polypeptide motif as depicted in column 7 of table IV, application no. 1;
[0636] (d) an isolated nucleic acid molecule having at least 30% identity with the nucleic acid molecule sequence of a polynucleotide comprising the nucleic acid molecule as depicted in column 5 or 7 of table I, application no. 1;
[0637] (e) an isolated nucleic acid molecule encoding a polypeptide having at least 30% identity, preferably at least 40%, 50%, 60%, 70%, 75%, 80%, 85%, 90%, 95%, 96%, 97%, 98%, 99%, 99.5%, with the amino acid sequence of the polypeptide encoded by the nucleic acid molecule of (a), (b), (c) or (d) and having the activity represented by a protein as depicted in column 5 table II, application no. 1;
[0638] (f) an isolated nucleic acid molecule encoding a polypeptide which is isolated with the aid of monoclonal or polyclonal antibodies made against a polypeptide encoded by one of the nucleic acid molecules of (a), (b), (c), (d) or (e) and having the activity represented by the protein as depicted in column 5 of table II, application no. 1;
[0639] (g) an isolated nucleic acid molecule encoding a polypeptide comprising the consensus sequence or the polypeptide motif as depicted in column 7 of table IV and preferably having the activity represented by a protein as depicted in column 5 table II, application no. 1
[0640] (h) an isolated nucleic acid molecule encoding a polypeptide having the activity represented by the protein as depicted in column 5 of table II, application no. 1;
[0641] (i) an isolated nucleic acid molecule encoding a polypeptide, the polypeptide being derived by substituting, deleting and/or adding one or more amino acids of the amino acid sequence of the polypeptide encoded by the nucleic acid molecules (a),(b), (c), (d), (e), (f), (g) or (i); and
[0642] (j) an isolated nucleic acid molecule which is obtainable by screening a suitable nucleic acid library, e.g. a library derived from a cDNA or a genomic library, under stringent hybridization conditions with a probe comprising a complementary sequence of a nucleic acid molecule of (a) or (b) or with a fragment thereof, having at least 15 nt, preferably 20 nt, 30 nt, 50 nt, 100 nt, 200 nt or 500 nt of a nucleic acid molecule complementary to a nucleic acid molecule sequence characterized in (a), (b), (c), (d), (e), (g), (h) or (i) and encoding a polypeptide having the activity represented by a protein as depicted in column 5 of table II, application no. 1;
   or which comprises a sequence which is complementary thereto.
   or reducing, repressing, decreasing or deleting of a expression product of a nucleic acid molecule comprising a nucleic acid molecule as depicted in (a), (b), (c), (d), (e), (f), (g), (h), (i) or (j), e.g. a polypeptide comprising a polypeptide as depicted in column 5 or 7 of table II, application no. 1, or comprising a consensus sequence or polypeptide motif as depicted in column 7 of table IV, application no. 1;
   and whereby in a preferred embodiment said nucleic acid molecule or polypeptide confers at least one of the activities shown in [0033.1. 1.1].

[0643] In one embodiment, the nucleic acid molecule used in the process distinguishes over the sequence as depicted in column 5 or 7 of table I A or B, application no. 1, by at least one or more nucleotides or does not consist of the sequence as depicted in column 5 or 7 of table I A or B, application no. 1.

[0644] In one embodiment, the nucleic acid molecule of the present invention is less than 100%, 99.999%, 99.99%, 99.9% or 99% identical to the sequence as depicted in column 5 or 7 of table I A or B, application no. 1.

[0645] In another embodiment, the nucleic acid molecule does not consist of the sequence as depicted in column 5 or 7 of table I A or B, application no. 1.

[0646] Nucleic acid molecules, which are advantageous for the process according to the invention and which encode nucleic acid molecules with the activity represented by an expression product of a nucleic acid molecule comprising a nucleic acid molecule as indicated in column 5 or 7 of table I B, application no. 1, preferable represented by a protein as indicated in column 5 or 7 of table I B, application no. 1, more preferred represented by the protein as indicated in column 5 of table I B, application no. 1, and conferring an enhanced yield, in particular a yield-related trait, e.g. nitrogen use efficiency and/or increased biomass production as compared to a corresponding, e.g. non-transformed, wild type plant after reducing or deleting their activity, can be determined from generally accessible databases.

[0647] As well, nucleic acid molecules, which are advantageous for the process according to the invention and which encode polypeptides with the activity represented by the protein comprising a polypeptide as indicated in column 5 or 7 of table II, application no. 1, or a consensus sequence or a polypeptide as motif indicated in column 7 of table IV, application no. 1, preferable represented by the protein as indicated in column 5 or 7 of Table II B, application no. 1, or comprising a consensus sequence or a polypeptide motif as indicated in column 7 of table IV, application no. 1, more preferred by the protein indicated in column 5 of table II B, application no. 1, and conferring the increased yield, in particular an increased yield-related trait, e.g. an increased nutrient use efficiency, such as an enhanced nitrogen use efficiency and/or increased tolerance to environmental stress and/or increased biomass production as compared to a corresponding, e.g. non-transformed, wild type plant can be determined from generally accessible databases.

[0648] Those databases, which must be mentioned, in particular in this context are general gene databases such as the EMBL database (Stoesser G. et al., Nucleic Acids Res. 29, 17 (2001)), the GenBank database (Benson D. A. et al., Nucleic Acids Res. 28, 15 (2000)), or the PIR database (Barker W. C. et al., Nucleic Acids Res. 27, 39 (1999)). It is furthermore possible to use organism-specific gene databases for determining advantageous sequences, in the case of yeast for example advantageously the SGD database (Chemy J. M. et al., Nucleic Acids Res. 26, 73 (1998)) or the MIPS database (Mewes H. W. et al., Nucleic Acids Res. 27, 44 (1999)), in the case of E. coli the GenProtEC database (http://web.bham.ac.uk/bcm4ght6/res.html), and in the case of Arabidopsis the TAIR-database (Huala, E. et al., Nucleic Acids Res. 29 (1), 102 (2001)) or the MIPS database.

[0649] Further, in another embodiment of the present invention, the molecule to be reduced in the process of the invention is novel. Thus, the present invention also relates to the novel nucleic acid molecule, the “nucleic acid molecule of the invention” or the “polynucleotide of the invention”.

[0650] The nucleic acid molecules used in the process according to the invention take the form of isolated nucleic acid sequences, which encode polypeptides with the activity of a protein as indicated in column 5 or 7 of table II A or B, application no. 1, preferable represented by a novel protein as indicated in column 7 of table II B, application no. 1, and enabling the enhancement of yield, in particular a yield-related trait, e.g. nitrogen use efficiency and/or increase in biomass production as compared to a corresponding, e.g. non-transformed, wild type plant by reducing, repressing, decreasing or deleting their activity.

[0651] Accordingly, in one embodiment, the invention relates to an isolated nucleic acid molecule conferring the expression of a product, the reduction, repression or deletion of which results in an enhancement of yield, in particular a yield-related trait, e.g. nitrogen use efficiency and/or increase of biomass production, especially in an enhancement of yield, in particular a yield-related trait, e.g. nitrogen use efficiency, or especially in an increase in biomass, or especially in an enhancement of NUE and increase of biomass, as compared to a corresponding, e.g. non-transformed, wild type plant and which comprises a nucleic acid molecule selected from the group consisting of:
[0652] (a) an isolated nucleic acid molecule encoding the polypeptide as depicted in column 5 or 7 of table II, application no. 1, preferably of Table II B or comprising the consensus sequence or the polypeptide motif, as depicted in column 7 table IV, application no. 1;
[0653] (b) an isolated nucleic acid molecule as depicted in column 5 or 7 of table I, application no. 1, preferably of Table I B;
[0654] (c) an isolated nucleic acid molecule, which, as a result of the degeneracy of the genetic code, can be derived from a polypeptide sequence as depicted in column 5 or 7 of table II, application no. 1, preferably of Table II B or from a polypeptide comprising the consensus sequence or the polypeptide motif, as depicted in column 7 table IV, application no. 1;
[0655] (d) an isolated nucleic acid molecule having at least 30% identity, preferably at least 40%, 50%, 60%, 70%, 75%, 80%, 85%, 90%, 95%, 96%, 97%, 98%, 99%, 99.5%, with the nucleic acid molecule sequence of a polynucleotide comprising the nucleic acid molecule as depicted in column 5 or 7 of table I, application no. 1, preferably of Table I B;
[0656] (e) an isolated nucleic acid molecule encoding a polypeptide having at least 30% identity, preferably at least 40%, 50%, 60%, 70%, 75%, 80%, 85%, 90%, 95%, 96%, 97%, 98%, 99%, 99.5%, with the amino acid sequence of the polypeptide encoded by the nucleic acid molecule of (a), (b), (c) or (d)) and having the activity represented by a protein as depicted in column 5 of table II, application no. 1;
[0657] (f) an isolated nucleic acid molecule encoding a polypeptide which is isolated with the aid of monoclonal or polyclonal antibodies directed against a polypeptide encoded by one of the nucleic acid molecules of (a), (b), (c), (d) or (e) and having the activity represented by the protein as depicted in column 5 of table II, application no. 1;
[0658] (g) an isolated nucleic acid molecule encoding a polypeptide comprising the consensus sequence or a polypeptide motif as depicted in column 7 of table IV, application no. 1;
[0659] (h) an isolated nucleic acid molecule encoding a polypeptide having the activity represented by the protein as depicted in column 5 of table II, application no. 1;
[0660] (i) an isolated nucleic acid molecule which comprises a polynucleotide, which is obtained by amplifying a cDNA library or a genomic library using the primers as depicted in column 7 of table III, application no. 1, which do not start at their 5 prime end with the nucleotides ATA;
[0661] (j) an isolated nucleic acid molecule encoding a polypeptide, the polypeptide being derived by substituting, deleting and/or adding one or more amino acids of the amino acid sequence of the polypeptide encoded by the nucleic acid molecules (a), (b), (c), (d), (e), (f), (g), (h) or (i) (c); and
[0662] (k) an isolated nucleic acid molecule which is obtainable by screening a suitable nucleic acid library under stringent hybridization conditions with a probe comprising a complementary sequence of a nucleic acid molecule of (a) or (b) or with a fragment thereof, having at least 15 nt, preferably 20 nt, 30 nt, 50 nt, 100 nt, 200 nt, 500 nt, 750 nt or 1000 nt of a nucleic acid molecule complementary to a nucleic acid molecule sequence characterized in (a) to (d) and encoding a polypeptide having the activity represented by a protein as depicted in column 5 of Table II, application no. 1;
   or which comprises a sequence which is complementary thereto;
   whereby the nucleic acid molecule according to (a), b), (c), (d), (e), (f), (g), (h), (i), (j) and (k) differs at least in one, five, ten, 20, 50, 100 or more nucleotides from the sequence as depicted in column 5 or 7 of table I A, application no. 1, and/or which encodes a protein which differs at least in one, five, ten, 20, 30, 50 or more amino acids from the polypeptide sequences as depicted in column 5 or 7 of able II A, application no. 1.

[0663] Accordingly, in another embodiment, the nucleic acid molecule of the invention does not consist of the sequence as depicted in column 5 or 7 of table I A, application no. 1.

[0664] In a further embodiment, the nucleic acid molecule of the present invention is at least 30% identical to the nucleic acid sequence as depicted in column 5 or 7 of table I A or B, application no. 1, and less than 100%, preferably less than 99.999%, 99.99% or 99.9%, more preferably less than 99%, 985, 97%, 96% or 95% identical to the sequence as depicted in column 5 or 7 of Table I A, application no. 1.

[0665] As used herein, the term “the nucleic acid molecule of the invention” refers to said nucleic acid molecule as described in this paragraph.

[0666] In one embodiment, the present invention also relates to a novel polypeptide, thus to the “the polypeptide of the invention” or the “protein of the invention”.

[0667] Preferably, the polypeptide does not comprise a polypeptide as depicted in column 5 or 7 of table II A, application no. 1. Preferably, the polypeptide of the inventions protein differs at least in one, five, ten, 20, 30, 50 or more amino acids from the polypeptide sequences as depicted in column 5 or 7 of table II A, application no. 1.

[0668] In a further embodiment, the polypeptide of the present invention is at least 30% identical to protein sequence as depicted in column 5 or 7 of table II A or B, application no. 1, and less than 100%, preferably less than 99.999%, 99.99% or 99.9%, more preferably less than 99%, 985, 97%, 96% or 95% identical to the sequence as depicted in column 5 or 7 of table II A, application no. 1.

[0669] As used herein, the terms “the molecule to be reduced in the process of the present invention”, “the nucleic acid molecule to be reduced in the process of the present invention” or “the polypeptide to be reduced in the process of the present invention” comprise the terms “the nucleic acid molecule of the invention” or “the polypeptide of the invention”, respectively.

[0670] In one embodiment, the nucleic acid molecule originates advantageously from a plant.

[0671] As mentioned, in one embodiment, crop plants are preferred, e.g. above host plants.

[0672] However, it is also possible to use artificial sequences, which differ preferably in one or more bases from the nucleic acid sequences found in organisms, or in one or more amino acid molecules from polypeptide sequences found in organisms, to carry out the invention, e.g. to repress, inactive or down regulate an activity selected from the group consisting of At1g74730-protein, At3g63270-protein, protein kinase, protein serine/threonine phosphatase, and SET domain-containing protein, e.g. to repress, inactive or down regulate an activity of the nucleic acid molecule or polypeptide, conferring above-mentioned activity, e.g. conferring the increased yield, in particular an increased yield-related trait, e.g. an increased nutrient use efficiency, such as an enhanced nitrogen use efficiency and/or increased tolerance to environmental stress and/or increased biomass production, especially an enhanced NUE, or especially an increased biomass production, or especially an enhanced NUE and/increased biomass production, as compared to a corresponding, e.g. non-transformed, wild type plant after reducing, repressing, decreasing or deleting its expression or activity.

[0673] In the process according to the invention nucleic acid molecules can be used, which, if appropriate, contain synthetic, non-natural or modified nucleotide bases, which can be incorporated into DNA or RNA. Said synthetic, non-natural or modified bases can for example increase the stability of the nucleic acid molecule outside or inside a cell. The nucleic acid molecules used in the process of the invention can contain the same modifications as aforementioned.

[0674] As used in the present context the nucleic acid molecule can also encompass the untranslated sequence located at the 3′ and at the 5′ end of the coding gene region, for example at least 500, preferably 200, especially preferably 100, nucleotides of the sequence upstream of the 5′ end of the coding region and at least 100, preferably 50, especially preferably 20, nucleotides of the sequence downstream of the 3′ end of the coding gene region. In the event for example the RNAi or antisense technology is used also the 5′- and/or 3′-regions can advantageously be used.

[0675] In one embodiment, it is advantageous to choose the coding region for cloning and expression of repression constructs, like antisense, RNAi order cosuppression constructs, in order to target several or all of the orthologous genes, which otherwise could compensate for each other.

[0676] In another embodiment, it is advantageous to use very gene specific sequences originating from the 3′ or 5′ prime region for the construction of repression constructs, with the aim to specifically reduce the activity or expression level of only the target gene and, thus, to avoid side effects by repressing other non-target genes (so called off-targets)

[0677] The person skilled in the art is familiar with analyzing the actual genomic situation in his target organism. The necessary information can be achieved by search in relevant sequence databases or performing genomic southern blottings dislosing the genomic structure of the target organism and eventually combining these results with informations about expression levels of the target genes disclosed herein, e.g. obtained by array experiments, northern blottings, or RT qPCR experiments.

[0678] Preferably, the nucleic acid molecule used in the process according to the invention or the nucleic acid molecule of the invention is an isolated nucleic acid molecule.

[0679] An “isolated” polynucleotide or nucleic acid molecule is separated from other polynucleotides or nucleic acid molecules, which are present in the natural source of the nucleic acid molecule. An isolated nucleic acid molecule may be a chromosomal fragment of several kb, or preferably, a molecule only comprising the coding region of the gene. Accordingly, an isolated nucleic acid molecule may comprise chromosomal regions, which are adjacent 5′ and 3′ or further adjacent chromosomal regions, but preferably comprises no such sequences which naturally flank the nucleic acid molecule sequence in the genomic or chromosomal context in the organism from which the nucleic acid molecule originates (for example sequences which are adjacent to the regions encoding the 5′- and 3′-UTRs of the nucleic acid molecule). In various embodiments, the isolated nucleic acid molecule used in the process according to the invention may, for example comprise less than approximately 5 kb, 4 kb, 3 kb, 2 kb, 1 kb, 0.5 kb or 0.1 kb nucleotide sequences which naturally flank the nucleic acid molecule in the genomic DNA of the cell from which the nucleic acid molecule originates.

[0680] The nucleic acid molecules used in the process or a part thereof can be isolated using molecular-biological standard techniques and the sequence information provided herein. Also, for example a homologous sequence or homologous, conserved sequence regions at the DNA or amino acid level can be identified with the aid of comparison algorithms. The former can be used as hybridization probes under standard hybridization techniques (for example those described in Sambrook et al., Molecular Cloning: A Laboratory Manual. 2^{nd} Ed., Cold Spring Harbor Laboratory, Cold Spring Harbor Laboratory Press, Cold Spring Harbor, N.Y., 1989) for isolating further nucleic acid sequences useful in this process.

[0681] A nucleic acid molecule encompassing a complete sequence of a molecule which activity is to be reduced in the process of the present invention, e.g. as disclosed in column 5 or 7 of table I, application no. 1, or a part thereof may additionally be isolated by polymerase chain reaction, oligonucleotide primers based on this sequence or on parts thereof being used. For example, a nucleic acid molecule comprising the complete sequence or part thereof can be isolated by polymerase chain reaction using oligonucleotide primers, which have been generated on the basis of the disclosed sequences. For example, mRNA can be isolated from cells, for example by means of the guanidinium thiocyanate extraction method of Chirgwin et al., Biochemistry 18, 5294 (1979) and cDNA can be generated by means of reverse transcriptase (for example Moloney MLV reverse transcriptase, available from Gibco/BRL, Bethesda, Md., or AMV reverse transcriptase, obtainable from Seikagaku America, Inc., St. Petersburg, Fla.).

[0682] Synthetic oligonucleotide primers for the amplification by means of polymerase chain reaction can be generated on the basis of a sequences shown herein, for example from the molecules comprising the molecules as depicted in column 5 or 7 of table I, application no. 1, or derived from the molecule as depicted in column 5 or 7 of table I or II application no. 1. Such primers can be used to amplify nucleic acids sequences for example from cDNA libraries or from genomic libraries and identify nucleic acid molecules, which are useful in the inventive process. For example, the primers as depicted in column 7 of table III, application no. 1, which do not start at their 5 prime end with the nucleotides ATA, are used.

[0683] Moreover, it is possible to identify conserved regions from various organisms by carrying out protein sequence alignments with the polypeptide encoded by the nucleic acid molecule to be reduced according to the process of the invention, in particular with the sequences encoded by the nucleic acid molecule as depicted in column 5 or 7 of table II, application no. 1, from which conserved regions, and in turn, degenerate primers can be derived.

[0684] Conserved regions are those, which show a very little variation in the amino acid in one particular position of several homologs from different origin. The consensus sequence and polypeptide motifs as depicted in column 7 of table IV, application no. 1, are derived from said alignments. Moreover, it is possible to identify conserved regions from various organisms by carrying out protein sequence alignments with the polypeptide encoded by the nucleic acid molecule to be reduced according to the process of the invention, in particular with the sequences encoded by the polypeptide molecule as depicted in column 5 or 7 of table II, application no. 1, from which conserved regions, and in turn, degenerate primers can be derived.

[0685] Conserved regions are those, which show a very little variation in the amino acid in one particular position of several homologs from different origin. The consensus sequences and polypeptide motifs as depicted in column 7 of table IV, application no. 1, are derived from said alignments. In one advantageous embodiment, in the method of the present invention the activity of a polypeptide is decreased comprising or consisting of a consensus sequence or a polypeptide motif as depicted in table IV, column 7, application no. 1, and in one another embodiment, the present invention relates to a polypeptide comprising or consisting of a consensus sequence or a polypeptide motif as depicted in table IV, columns 7, application no. 1, whereby 20 or less, preferably 15 or 10, preferably 9, 8, 7, or 6, more preferred 5 or 4, even more preferred 3, even more preferred 2, even more preferred 1, most preferred 0 of the amino acids positions indicated can be replaced by any amino acid. In one embodiment not more than 15%, preferably 10%, even more preferred 5%, 4%, 3%, or 2%, most preferred 1% or 0% of the amino acid position indicated by a letter are/is replaced by another amino acid. In one embodiment 20 or less, preferably 15 or 10, preferably 9, 8, 7, or 6, more preferred 5 or 4, even more preferred 3, even more preferred 2, even more preferred 1, most preferred 0 amino acids are inserted into a consensus sequence or protein motif.

[0686] The consensus sequence was derived from a multiple alignment of the sequences as listed in table II. The letters represent the one letter amino acid code and indicate that the amino acids are conserved in all aligned proteins. The letter X stands for amino acids, which are not conserved in all sequences. In one example, in the cases where only a small selected subset of amino acids are possible at a certain position these amino acids are given in brackets. The number of given X indicates the distances between conserved amino acid residues, e.g. Y-x(21,23)—F means that conserved tyrosine and phenylalanine residues are separated from each other by minimum 21 and maximum 23 amino acid residues in all investigated sequences.

[0687] Conserved domains were identified from all sequences and are described using a subset of the standard Prosite notation, e.g the pattern Y-x(21,23)-[FW] means that a conserved tyrosine is separated by minimum 21 and maximum 23 amino acid residues from either a phenylalanine or tryptophane.

[0688] Conserved patterns were identified with the software tool MEME version 3.5.1 or manually. MEME was developed by Timothy L. Bailey and Charles Elkan, Dept. of Computer Science and Engineering, University of California, San Diego, USA and is described by Timothy L. Bailey and Charles Elkan (Fitting a mixture model by expectation maximization to discover motifs in biopolymers, Proceedings of the Second International Conference on Intelligent Systems for Molecular Biology, pp. 28-36, AAAI Press, Menlo Park, Calif., 1994]. The source code for the stand-alone program is public available from the San Diego Supercomputer center (http://meme.sdsc.edu).

[0689] For identifying common motifs in all sequences with the software tool MEME, the following settings were used: -maxsize 500000, -nmotifs 15, -evt 0.001, -maxw 60, -distance 1e-3, minsites number of sequences used for the analysis. Input sequences for MEME were non-aligned sequences in Fasta format. Other parameters were used in the default settings in this software version.

[0690] Prosite patterns for conserved domains were generated with the software tool Pratt version 2.1 or manually. Pratt was developed by Inge Jonassen, Dept. of Informatics, University of Bergen, Norway and is described by Jonassen et al. (Jonassen I., Collins J. F. and Higgins D. G., Protein Science 4, 1587 (1995); Jonassen I., Efficient discovery of conserved patterns using a pattern graph, Submitted to CABIOS Febr. 1997]. The source code (ANSI C) for the stand-alone program is public available, e.g. at established Bioinformatic centers like EBI (European Bioinformatics Institute).

[0691] For generating patterns with the software tool Pratt, following settings were used: PL (max Pattern Length): 100, PN (max Nr of Pattern Symbols): 100, PX (max Nr of consecutive x's): 30, FN (max Nr of flexible spacers): 5, FL (max Flexibility): 30, FP (max Flex. Product): 10, ON (max number patterns): 50. Input sequences for Pratt were distinct regions of the protein sequences exhibiting high similarity as identified from software tool MEME. The minimum number of sequences, which have to match the generated patterns (CM, min Nr of Seqs to Match) was set to at least 80% of the provided sequences. Parameters not mentioned here were used in their default settings.

[0692] The Prosite patterns of the conserved domains can be used to search for protein sequences matching this pattern. Various established Bioinformatic centers provide public internet portals for using those patterns in database searches (e.g. PIR (Protein Information Resource, located at Georgetown University Medical Center) or ExPASy (Expert Protein Analysis System)). Alternatively, stand-alone software is available, like the program Fuzzpro, which is part of the EMBOSS software package. For example, the program Fuzzpro not only allows searching for an exact pattern-protein match but also allows to set various ambiguities in the performed search.

[0693] The alignment was performed with the software ClustalW (version 1.83) and is described by Thompson et al. [Thompson J. D., Higgins D. G. and Gibson T. J. Nucleic Acids Research, 22, 4673 (1994)]. The source code for the stand-alone program is public available from the European Molecular Biology Laboratory; Heidelberg, Germany. The analysis was performed using the default parameters of ClustalW v1.83 (gap open penalty: 10.0; gap extension penalty: 0.2; protein matrix: Gonnet; protein/DNA endgap: −1; protein/DNA gapdist: 4).

[0694] Degenerate primers, designed as described above, can then be utilized by PCR for the amplification of fragments of novel coding regions coding for proteins having above-mentioned activity, e.g. conferring the enhancement of yield, in particular a yield-related trait, e.g. nitrogen use efficiency and/or and the increased biomass production as compared to a corresponding, e.g. non-transformed, wild type plant after reducing, repressing, decreasing or deleting the expression or activity of the respective nucleic acid sequence or the protein encoded by said sequence, e.g. which having the activity of a protein encoded by a nucleic acid which activity is to be reduced or deleted in the process of the invention or further functional equivalent or homologues from other organisms.

[0695] These fragments can then be utilized as hybridization probe for isolating the complete gene sequence. As an alternative, the missing 5′ and 3′ sequences can be isolated by means of RACE-PCR. A nucleic acid molecule according to the invention can be amplified using cDNA or, as an alternative, genomic DNA as template and suitable oligonucleotide primers, following standard PCR amplification techniques. The nucleic acid molecule amplified thus can be cloned into a suitable vector and characterized by means of DNA sequence analysis. Oligonucleotides, which correspond to one of the nucleic acid molecules used in the process, can be generated by standard synthesis methods, for example using an automatic DNA synthesizer.

[0696] Nucleic acid molecules which are advantageously for the process according to the invention can be isolated based on their homology to the nucleic acid molecules disclosed herein using the sequences or part thereof as hybridization probe and following standard hybridization techniques under stringent hybridization conditions.

[0697] In this context, it is possible to use, for example, isolated nucleic acid molecules of at least 15, 20, 25, 30, 35, 40, 50, 60 or more nucleotides, preferably of at least 15, 20 or 25 nucleotides in length which hybridize under stringent conditions with the above-described nucleic acid molecules, in particular with those which encompass a nucleotide sequence as depicted in column 5 or 7 of table I, application no. 1. Nucleic acid molecules with 30, 50, 100, 250 or more nucleotides may also be used.

[0698] The term “homology” means that the respective nucleic acid molecules or encoded proteins are functionally and/or structurally equivalent. The nucleic acid molecules that are homologous to the nucleic acid molecules described above and that are derivatives of said nucleic acid molecules are, for example, variations of said nucleic acid molecules which represent modifications having the same biological function, in particular encoding proteins with the same or substantially the same biological function. They may be naturally occurring variations, such as sequences from other plant varieties or species, or mutations. These mutations may occur naturally or may be obtained by mutagenesis techniques. The allelic variations may be naturally occurring allelic variants as well as synthetically produced or genetically engineered variants. Structurally equivalents can for example be identified by testing the binding of said polypeptide to antibodies or computer based predictions. Structurally equivalent have the similar immunological characteristic, e.g. comprise similar epitopes.

[0699] By “hybridizing” it is meant that such nucleic acid molecules hybridize under conventional hybridization conditions, preferably under stringent conditions such as described by, e.g., Sambrook (Molecular Cloning; A Laboratory Manual, 2^{nd} Edition, Cold Spring Harbor Laboratory Press, Cold Spring Harbor, N.Y. (1989)) or in Current Protocols in Molecular Biology, John Wiley & Sons, N.Y. (1989), 6.3.1-6.3.6.

[0700] According to the invention, DNA as well as RNA molecules of the nucleic acid of the invention can be used as probes. Further, as template for the identification of functional homologues Northern blot assays as well as Southern blot assays can be performed. The Northern blot assay advantageously provides further informations about the expressed gene product: e.g. expression pattern, occurrence of processing steps, like splicing and capping, etc. The Southern blot assay provides additional information about the chromosomal localization and organization of the gene encoding the nucleic acid molecule of the invention.

[0701] A preferred, nonlimiting example of stringent Southern blot hydridization conditions are hybridizations in 6× sodium chloride/sodium citrate (═SSC) at approximately 45° C., followed by one or more wash steps in 0.2×SSC, 0.1% SDS at 50 to 65° C., for example at 50° C., 55° C. or 60° C. The skilled worker knows that these hybridization conditions differ as a function of the type of the nucleic acid and, for example when organic solvents are present, with regard to the temperature and concentration of the buffer. The temperature under “standard hybridization conditions” differs for example as a function of the type of the nucleic acid between 42° C. and 58° C., preferably between 45° C. and 50° C. in an aqueous buffer with a concentration of 0.1×0.5 x, 1×, 2×, 3×, 4× or 5×SSC (pH 7.2). If organic solvent(s) is/are present in the abovementioned buffer, for example 50% formamide, the temperature under standard conditions is approximately 40° C., 42° C. or 45° C. The hybridization conditions for DNA:DNA hybrids are preferably for example 0.1×SSC and 20° C., 25° C., 30° C., 35° C., 40° C. or 45° C., preferably between 30° C. and 45° C. The hybridization conditions for DNA:RNA hybrids are preferably for example 0.1×SSC and 30° C., 35° C., 40° C., 45° C., 50° C. or 55° C., preferably between 45° C. and 55° C. The abovementioned hybridization temperatures are determined for example for a nucleic acid approximately 100 by (=base pairs) in length and a G+C content of 50% in the absence of formamide. The skilled worker knows to determine the hybridization conditions required with the aid of textbooks, for example the ones mentioned above, or from the following textbooks: Sambrook et al., “Molecular Cloning”, Cold Spring Harbor Laboratory, 1989; Hames and Higgins (Ed.) 1985, “Nucleic Acids Hybridization: A Practical Approach”, IRL Press at Oxford University Press, Oxford; Brown (Ed.) 1991, “Essential Molecular Biology: A Practical Approach”, IRL Press at Oxford University Press, Oxford.

[0702] A further example of one such stringent hybridization condition is hybridization at 4×SSC at 65° C., followed by a washing in 0.1×SSC at 65° C. for one hour. Alternatively, an exemplary stringent hybridization condition is in 50% formamide, 4×SSC at 42° C. Further, the conditions during the wash step can be selected from the range of conditions delimited by low-stringency conditions (approximately 2×SSC at 50° C.) and high-stringency conditions (approximately 0.2×SSC at 50° C., preferably at 65° C.) (20×SSC: 0.3M sodium citrate, 3M NaCl, pH 7.0). In addition, the temperature during the wash step can be raised from low-stringency conditions at room temperature, approximately 22° C., to higher-stringency conditions at approximately 65° C.

[0703] Both of the parameters salt concentration and temperature can be varied simultaneously, or else one of the two parameters can be kept constant while only the other is varied. Denaturants, for example formamide or SDS, may also be employed during the hybridization. In the presence of 50% formamide, hybridization is preferably effected at 42° C. Relevant factors like 1) length of treatment, 2) salt conditions, 3) detergent conditions, 4) competitor DNAs, 5) temperature and 6) probe selection can combined case by case so that not all possibilities can be mentioned herein.

[0704] Some examples of conditions for DNA hybridization (Southern blot assays) and wash step are shown hereinbelow:

(1) Hybridization conditions can be selected, for example, from the following conditions:
[0705] a) 4×SSC at 65° C.,
[0706] b) 6×SSC at 45° C.,
[0707] c) 6×SSC, 100 mg/ml denatured fragmented fish sperm DNA at 68° C.,
[0708] d) 6×SSC, 0.5% SDS, 100 mg/ml denatured salmon sperm DNA at 68° C.,
[0709] e) 6×SSC, 0.5% SDS, 100 mg/ml denatured fragmented salmon sperm DNA, 50% formamide at 42° C.,
[0710] f) 50% formamide, 4×SSC at 42° C.,
[0711] g) 50% (vol/vol) formamide, 0.1% bovine serum albumin, 0.1% Ficoll, 0.1% polyvinylpyrrolidone, 50 mM sodium phosphate buffer pH 6.5, 750 mM NaCl, 75 mM sodium citrate at 42° C.,
[0712] h) 2× or 4×SSC at 50° C. (low-stringency condition), or
[0713] i) 30 to 40% formamide, 2× or 4×SSC at 42° C. (low-stringency condition).
   (2) Wash steps can be selected, for example, from the following conditions:
[0714] a) 0.015 M NaCl/0.0015 M sodium citrate/0.1% SDS at 50° C.
[0715] b) 0.1×SSC at 65° C.
[0716] c) 0.1×SSC, 0.5% SDS at 68° C.
[0717] d) 0.1×SSC, 0.5% SDS, 50% formamide at 42° C.
[0718] e) 0.2×SSC, 0.1% SDS at 42° C.
[0719] f) 2×SSC at 65° C. (low-stringency condition).
[0720] g) 0.2×SSC, 0.1% SDS at 60° C. (medium-high stringency conditions), or
[0721] h) 0.1×SSC, 0.1% SDS at 60° C. (medium-high stringency conditions), or
[0722] i) 0.2×SSC, 0.1% SDS at 65° C. (high stringency conditions), or
[0723] j) 0.1×SSC, 0.1% SDS at 65° C. (high stringency conditions)

[0724] Polypeptides or nucleic acid molecules having above-mentioned activity, e.g. conferring the increased yield, in particular an increased yield-related trait, e.g. an increased nutrient use efficiency, such as an enhanced nitrogen use efficiency and/or increased tolerance to environmental stress and/or increased biomass production as compared to a corresponding, e.g. non-transformed, wild type plant derived from other organisms, can be encoded by other DNA molecules, which hybridize to a molecule as depicted in column 5 or 7 of table I, or comprising it, under relaxed hybridization conditions and which code on expression for peptides or nucleic acids which activity needs to reduced or deleted to confer an enhanced yield, in particular a yield-related trait, e.g. nitrogen use efficiency and/or an increased biomass production as compared to a corresponding, e.g. non-transformed, wild type plant.

[0725] Preferably, the polypeptides or polynucleotides have further biological activities of the protein or the nucleic acid molecule comprising a molecule as depicted in column 5 or 7 of table I, II or IV, application no. 1, respectively. Relaxed hybridization conditions can for example used in Southern Blotting experiments.

[0726] Some applications have to be performed at low stringency hybridization conditions, without any consequences for the specificity of the hybridization. For example, a Southern blot analysis of total DNA could be probed with a nucleic acid molecule of the present invention and washed at low stringency (55° C. in 2×SSPE, 0.1% SDS). The hybridisation analysis could reveal a simple pattern of only genes encoding polypeptides of the present invention, e.g. having herein-mentioned activity. A further example of such low-stringent hybridization conditions is 4×SSC at 50° C. or hybridization with 30 to 40% formamide at 42° C. Such molecules comprise those which are fragments, analogues or derivatives of the nucleic acid molecule to be reduced in the process of the invention or encoding the polypeptide to be reduced in the process of the invention and differ, for example, by way of amino acid and/or nucleotide deletion(s), insertion(s), substitution (s), addition(s) and/or recombination (s) or any other modification(s) known in the art either alone or in combination from the above-described amino acid sequences or said (underlying) nucleotide sequence(s).

[0727] However, it is preferred to use high stringency hybridisation conditions.

[0728] Hybridization should advantageously be carried out with fragments of at least 5, 10, 15, 20, 25, 30, 35 or 40 bp, advantageously at least 50, 60, 70 or 80 bp, preferably at least 90, 100 or 110 bp. Most preferably are fragments of at least 15, 20, 25 or 30 bp. Preferably are also hybridizations with at least 100 by or 200, very especially preferably at least 400 by in length. In an especially preferred embodiment, the hybridization should be carried out with the entire nucleic acid sequence with conditions described above.

[0729] The terms “fragment”, “fragment of a sequence” or “part of a sequence” mean a truncated sequence of the original sequence referred to. The truncated sequence (nucleic acid or protein sequence) can vary widely in length; the minimum size being a sequence of sufficient size to provide a sequence or sequence fragment with at least 15, 20, 21, 22, 23, 24, 25, 26, 27, 28, 29, 30 by in length with at least 90, 91, 92, 93, 94, 95, 96, 97, 98 or 99% identity preferably 100% identity with a fragment of a nucleic acid molecule described herein for the use in the process of the invention, e.g. a fragment of the nucleic acid molecules which activity is to be reduced in the process of the invention. Said truncated sequences can as mentioned vary widely in length from 15 by up to 2 kb or more, advantageously the sequences have a minimal length of 15, 20, 25, 30, 35 or 40 bp, while the maximum size is not critical. 100, 200, 300, 400, 500 or more base pair fragments can be used. In some applications, the maximum size usually is not substantially greater than that required to provide the complete gene function(s) of the nucleic acid sequences. Such sequences can advantageously been used for the repression, reduction, decrease or deletion of the activity to be reduced in the process of the invention, by for example the antisense, RNAi, snRNA, dsRNA, siRNA, miRNA, ta-siRNA, cosuppression molecule, ribozyme etc. technology.

[0730] For the reduction, decrease or deletion of the activity of a nucleic acid molecule comprising a nucleic acid molecule as depicted in column 5 or 7 of Table I and/or a polypeptide comprising a polypeptide as depicted in column 5 or 7 of Table II or a consensus sequence or a polypeptide motif as depicted in column 7 of Table IV also the promotor regions of the disclosed nucleic acid sequences can be used. The skilled worker knows how to clone said promotor regions.

[0731] Typically, the truncated amino acid molecule will range from about 5 to about 310 amino acids in length. More typically, however, the sequence will be a maximum of about 250 amino acid in length, preferably a maximum of about 200 or 100 amino acid. It is usually desirable to select sequences of at least about 10, 12 or 15 amino acid, up to a maximum of about 20 or 25 amino acids.

[0732] The term “one or several amino acid” relates to at least one amino acid but not more than that number of amino acid, which would result in a homology of below 50% identity. Preferably, the identity is more than 70% or 80%, more preferred are 85%, 90%, 91%, 92%, 93%, 94% or 95%, even more preferred are 96%, 97%, 98%, or 99% identity.

[0733] Further, the nucleic acid molecule used in the process of the invention comprises a nucleic acid molecule, which is a complement of one of the nucleotide sequences of above mentioned nucleic acid molecules or a portion thereof. A nucleic acid molecule which is complementary to one of the nucleotide sequences as depicted in column 5 or 7 of table I, application no. 1, or a nucleic acid molecule comprising said sequence is one which is sufficiently complementary to said nucleotide sequences such that it can hybridize to said nucleotide sequences, thereby forming a stable duplex.

[0734] Preferably, the hybridisation is performed under stringent hybridization conditions. However, a complement of one of the herein disclosed sequences is preferably a sequence complement thereto according to the base pairing of nucleic acid molecules well known to the skilled person. For example, the bases A and G undergo base pairing with the bases T and U or C, resp. and vice versa. Modifications of the bases can influence the base-pairing partner.

[0735] The nucleic acid molecule which activity is to be reduced in the process of the invention, in particular the nucleic acid molecule of the invention comprises a nucleotide sequence which is at least about 30%, 35%, 40% or 45%, preferably at least about 50%, 55%, 60% or 65%, more preferably at least about 70%, 80%, or 90%, and even more preferably at least about 95%, 97%, 98%, 99% or more homologous to a nucleotide sequence comprising a nucleic acid molecule as depicted in column 5 or 7 of table I, application no. 1, or a portion thereof and/or has the activity of the protein indicated in the same line in column 5 of Table II, application no. 1, or the nucleic acid molecule encoding said protein.

[0736] The nucleic acid molecule which activity is to be reduced in the process of the invention, e.g. the nucleic acid molecule of the invention, comprises a nucleotide sequence which hybridizes, preferably hybridizes under stringent conditions as defined herein, to one of the nucleotide sequences as depicted in column 5 or 7 of table I, or a portion thereof and encodes a protein having aforementioned activity, e.g. conferring the increased yield, in particular an increased yield-related trait, e.g. an increased nutrient use efficiency, such as an enhanced nitrogen use efficiency and/or increased tolerance to environmental stress and/or increased biomass production as compared to a corresponding, e.g. non-transformed, wild type plant upon the reduction of deletion of its activity, and e.g. of the activity of the protein.

[0737] Moreover, the nucleic acid molecule which activity is reduced in the process of the invention, in particular the nucleic acid molecule of the invention, can comprise only a portion of the coding region of one of the sequences depicted in column 5 or 7 of table I, application no. 1, for example a fragment which can be used as a probe or primer or a fragment encoding a biologically active portion of the nucleic acid molecule or polypeptide to be reduced in the process of the present invention or a fragment encoding a non active part of the nucleic acid molecule or the polypeptide which activity is reduced in the process of the invention but conferring an increased yield, in particular an increased yield-related trait, e.g. an increased nutrient use efficiency, such as an enhanced nitrogen use efficiency and/or increased tolerance to environmental stress and/or increased biomass production as compared to a corresponding, e.g. non-transformed, wild type plant if its expression or activity is reduced or deleted.

[0738] The nucleotide sequences determined from the cloning of the gene encoding the molecule which activity is reduced in the process of the invention allows the generation of probes and primers designed for the use in identifying and/or cloning its homologues in other cell types and organisms. The probe/primer typically comprises substantially purified oligonucleotide. The oligonucleotide typically comprises a region of nucleotide sequence that hybridizes under stringent conditions to at least about 12, 15 preferably about 20 or 25, more preferably about 40, 50 or 75 consecutive nucleotides of a sense strand of one of the sequences set forth described for the use in the process of the invention, e.g., comprising the molecule as depicted in column 5 or 7 of table I, an anti-sense sequence of one of said sequence or naturally occurring mutants thereof. Primers based on a nucleotide of invention can be used in PCR reactions to clone homologues of the nucleic acid molecule which activity is to be reduced according to the process of the invention, e.g. as primer pairs described in the examples of the present invention, for example primers as depicted in column 7 of table III, which do not start at their 5 prime end with the nucleotides ATA. Said nucleic acid molecules, which are homologues of the nucleic acid molecules which activity is to be reduced in the process of the invention or the nucleic acid molecules of the invention themselves can be used to reduce, decrease or delete the activity to be reduced according to the process of the invention.

[0739] Primer sets are interchangable. The person skilled in the art knows to combine said primers to result in the desired product, e.g. in a full-length clone or a partial sequence. Probes based on the sequences of the nucleic acid molecule used in the process of the invention can be used to detect transcripts or genomic sequences encoding the same or homologous proteins. The probe can further comprise a label group attached thereto, e.g. the label group can be a radioisotope, a fluorescent compound, an enzyme, or an enzyme co-factor. Such probes can be used as a part of a genomic marker test kit for identifying cells which contain, or express or do not contain or express a nucleic acid molecule which activity is reduced in the process of the invention, such as by measuring a level of an encoding nucleic acid molecule in a sample of cells, e.g. detecting mRNA levels or determining, whether a genomic gene comprising the sequence of the polynucleotide has been mutated or deleted.

[0740] In one embodiment, the nucleic acid molecule used in the process of the invention, preferably the polynucleotide of the invention, encodes a polypeptide or portion thereof which includes an amino acid sequence which is sufficiently homologous to the amino acid sequence as depicted in column 5 or 7 of table II, application no. 1, or which is sufficiently homologous to a polypeptide comprising a consensus sequence or a polypeptide motif as depicted in column 7 of table IV, application no. 1.

[0741] As used herein, the language “sufficiently homologous” refers to polypeptides or portions thereof which have an amino acid sequence which includes a minimum number of identical or equivalent amino acid residues (e.g. an amino acid residue which has a similar side chain as the amino acid residue to which it is compared) compared to an amino acid sequence of an polypeptide which activity is reduced in the process of the present invention, in particular, the polypeptide is sufficiently homologous to a polypeptide comprising a polypeptide, a consensus sequence or a polypeptide motif as depicted in column 5 or 7 of table II or IV or e.g. to a functional equivalent thereof.

[0742] Portions of the aforementioned amino acid sequence are at least 3, 5, 10, 20, 30, 40, 50 or more amino acid in length.

[0743] In one embodiment, the nucleic acid molecule used in the process of the present invention comprises a nucleic acid molecule that encodes at least a portion of the polypeptide which activity is reduced in the process of the present invention, e.g. of a polypeptide as depicted in column 5 or 7 of table II A or B, application no. 1, or a homologue thereof.

[0744] In a further embodiment, the polypeptide which activity is reduced in the process of the invention, in particular the polypeptide of the invention, is at least about 30%, 35%, 40%, 45% or 50%, preferably at least about 55%, 60%, 65% or 70% and more preferably at least about 75%, 80%, 85%, 90%, 91%, 92%, 93% or 94% and most preferably at least about 95%, 97%, 98%, 99% or more homologous to an entire amino acid sequence of a polypeptide as depicted in column 5 or 7 of table II, application no. 1, or to a polypeptide comprising a consensus sequence or a polypeptide motif as depicted in column 7 of table IV, application no. 1, and having above-mentioned activity, e.g. conferring preferably the increased yield, in particular an increased yield-related trait, e.g. an increased nutrient use efficiency, such as an enhanced nitrogen use efficiency and/or increased tolerance to environmental stress and/or increased biomass production as compared to a corresponding, e.g. non-transformed, wild type plant after its activity has been reduced, repressed or deleted.

[0745] Portions of the protein are preferably in such a manner biologically active, that they are enhancing the yield, in particular a yield-related trait, e.g. nitrogen use efficiency and/or increasing the biomass production as compared to a corresponding, e.g. non-transformed, wild type plant by being in their activity reduced, repressed, decreased or deleted.

[0746] As mentioned herein, the term “biologically active portion” is intended to include a portion, e.g., a domain/motif or a epitope, that shows by introducing said portion or an encoding polynucleotide into an organism, or a part thereof, particulary into a cell, the same activity as its homologue as depicted in column 5 or 7 of table II or IV.

[0747] In one embodiment, the portion of a polypeptide has the activity of a polypeptide as its homologue as depicted in column 5 or 7 of table II, application no. 1, if it is able to complementate a knock out mutant as described herein.

[0748] The invention further relates to nucleic acid molecules which as a result of degeneracy of the genetic code can be derived from a polypeptide as depicted in column 5 or 7 of table II, application no. 1, or from a polypeptide comprising a consensus sequence or a polypeptide motif as depicted in column 7 of table IV, application no. 1, and thus encodes a polypeptide to be reduced in the process of the present invention, in particular a polypeptide leading by reducing, repressing, decreasing or deleting its activity to an enhancement of yield, in particular a yield-related trait, e.g. nitrogen use efficiency and/or increasing in the biomass production as compared to a corresponding, e.g. non-transformed, wild type plant.

[0749] Advantageously, the nucleic acid molecule which activity is reduced in the process of the invention comprises or has a nucleotide sequence encoding a protein comprising or having an amino acid molecule, a consensus sequence or a polypeptide motif as depicted in column 5 or 7 of table II or IV, application no. 1, and differs from the amino acid molecule's sequences as depicted in column 5 or 7 of Table II A, application no. 1, preferably in at least one or more amino acid.

[0750] Said above nucleic acid molecules, e.g. the nucleic acid molecules which as a result of the degeneracy of the genetic code can be derived from said polypeptide sequences, can be used for the production of a nucleic acid molecule, e.g. an antisense molecule, a tRNAs, a snRNAs, a dsRNAs, a siRNAs, a miRNAs, a ta-siRNA, cosuppression molecules, a ribozymes molecule, or a viral nucleic acid molecule, or another inhibitory or activity reducing molecule as described herein for the use in the process of the invention, e.g. for the repression, decrease or deletion of the activity of the polypeptide or the nucleic acid molecule for use in the process of the invention according to the disclosure herein.

[0751] In addition, it will be appreciated by those skilled in the art that DNA sequence polymorphisms that lead to changes in the amino acid sequences may exist within a population. Such genetic polymorphism in the gene, e.g. encoding the polypeptide of the invention or comprising the nucleic acid molecule of the invention may exist among individuals within a population due to natural variation.

[0752] As used herein, the terms “gene” and “recombinant gene” refer to nucleic acid molecules comprising an open reading frame encoding a polypeptide comprising the polypeptide which activity is reduced in the process or the invention or a to a nucleic acid molecule encoding a polypeptide molecule which activity is reduced in the process of the present invention. For example, the gene comprises a open reading frame encoding a polypeptide comprising the polypeptide, the consensus sequence or the polypeptide motif as depicted in column 5 or 7 of table II or IV, such as the polypeptide of the invention, or encoding a nucleic acid molecule comprising a polynucleotide as depicted in column 5 or 7 of table I, such as the nucleic acid molecule of the invention and being preferably derived from a crop plant.

[0753] The gene can also be a natural variation of said gene.

[0754] Such natural variations can typically result in 1-5% variance in the nucleotide sequence of the gene used in the inventive process.

[0755] Nucleic acid molecules corresponding to natural variant homologues of the nucleic acid molecule comprising a polynucleotide as depicted in column 5 or 7 of table I, application no. 1, such as the nucleic acid molecule of the invention, and which can also be a cDNA, can be isolated based on their homology to the nucleic acid molecules disclosed herein using the nucleic acid molecule as depicted in column 5 or 7 of table I, application no. 1, e.g. the nucleic acid molecule of the invention, or a fragment thereof, as a hybridization probe according to standard hybridization techniques under stringent hybridization conditions.

[0756] Accordingly, in another embodiment, the nucleic acid molecule which activity is reduced in the process of the invention, e.g. the nucleic acid molecule of the invention is at least 15, 20, 25 or 30 nucleotides in length. Preferably, it hybridizes under stringent conditions to a nucleic acid molecule comprising a nucleotide sequence of the nucleic acid molecule of the present invention, e.g. comprising the sequence as depicted in column 5 or 7 of table I, application no. 1. The nucleic acid molecule is preferably at least 20, 30, 50, 100, 250 or more nucleotides in length.

[0757] The term “hybridizes under stringent conditions” is defined above. In one embodiment, the term “hybridizes under stringent conditions” is intended to describe conditions for hybridization and washing under which nucleotide sequences of at least 30%, 40%, 50% or 65% identical to each other typically remain hybridized to each other. Preferably, the conditions are such that sequences of at least about 70%, more preferably at least about 75% or 80%, and even more preferably of at least about 85%, 90% or 95% or more identical to each other typically remain hybridized to each other.

[0758] In one embodiment the nucleic acid molecule of the invention hybridizes under stringent conditions to a sequence of column 7 of table 1B, application no. 1, and corresponds to a naturally-occurring nucleic acid molecule. As used herein, a “naturally-occurring” nucleic acid molecule refers to a RNA or DNA molecule having a nucleotide sequence that occurs in nature (e.g., encodes a natural protein). Preferably, the nucleic acid molecule encodes a natural protein conferring an enhancement of yield, in particular a yield-related trait, e.g. nitrogen use efficiency and/or of the biomass production as compared to a corresponding, e.g. non-transformed, wild type plant after reducing, decreasing or deleting the expression or activity thereof.

[0759] In addition to naturally-occurring variants of the nucleic acid or protein sequence that may exist in the population, the skilled artisan will further appreciate that changes can be introduced by mutation into a nucleotide sequence of the nucleic acid molecule encoding the polypeptide, thereby leading to changes in the amino acid sequence of the encoded polypeptide and thereby altering the functional ability of the polypeptide, meaning preferably reducing, decreasing or deleting said activity. For example, nucleotide substitutions leading to amino acid substitutions at “essential” amino acid residues can be made in a sequence of the nucleic acid molecule to be reduced in the process of the invention, e.g. comprising the corresponding nucleic acid molecule as depicted in column 5 or 7 of table I, application no. 1. An “essential” amino acid residue is a residue that if altered from the wild-type sequence of one of the polypeptide lead to an altered activity of said polypeptide, whereas a “non-essential” amino acid residue is not required for the activity of the protein for example for the activity as an enzyme. The alteration of “essential” residues often lead to a reduced decreased or deleted activity of the polypeptides. Preferably amino acid of the polypeptide are changed in such a manner that the activity is reduced, decreased or deleted that means preferably essential amino acid residues and/or more non-essential residues are changed and thereby the activity is reduced, which leads as mentioned above to an enhancement of yield, in particular a yield-related trait, e.g. nitrogen use efficiency and/or an increase in biomass production as compared to a corresponding, e.g. non-transformed, wild type plant in a plant after decreasing the expression or activity of the polypeptide. Other amino acid residues, however, (e.g., those that are not conserved or only semi-conserved in the domain having said activity) may not be essential for activity and thus are likely to be amenable to alteration without altering said activity are less preferred.

[0760] A further embodiment of the invention relates to the specific search or selection of changes in a nucleic acid sequence which confer a reduced, repressed or deleted activity in a population, e.g. in a natural or artificial created population. It is often complex and expensive to search for an enhancement of yield, in particular a yield-related trait, e.g. nitrogen use efficiency and/or an increase in biomass production as compared to a corresponding, e.g. non-transformed, wild type plant in a population, e.g. due to complex analytical procedures. It can therefore be advantageous to search for changes in a nucleic acid sequence which confer a reduced, repressed or deleted activity of the expression product in said population, thus, identifying candidates which bring about the desired enhancement of yield, in particular a yield-related trait, e.g. nitrogen use efficiency and/or an increase in biomass production as compared to a corresponding, e.g. non-transformed, wild type plant content. A typical example of a natural gene, the downregulation of which leads to the desired trait is the mlo locus (Pifanelli et al., Nature 430 (7002), 887 (2004)). Barley plants carrying loss-of-function alleles (mlo) of the Mlo locus are resistant against all known isolates of the widespread powdery mildew fungus. The sole mlo resistance allele recovered so far from a natural habitat, mlo-11, was originally retrieved from Ethiopian land races and nowadays controls mildew resistance in the majority of cultivated European spring barley elite varieties. Thus, one can search for natural alleles, which bring about the desired reduction, repression, deletion or decrease in the function of a nucleic acid molecule and can introduce such alleles into agronomical important crop varieties through crossing and marker assisted selection or related methods.

[0761] Further, a person skilled in the art knows that the codon usage between organisms can differ. Therefore, he will adapt the codon usage in the nucleic acid molecule of the present invention to the usage of the organism in which the polynucleotide or polypeptide is expressed, so that the expression of the nucleic acid molecule or the encoded protein is more likely reduced.

[0762] Accordingly, the invention relates to a homologues nucleic acid molecule of a nucleic acid molecules encoding a polypeptide having abovementioned activity in a plant or parts thereof after being reduced, decreases, repressed or deleted, that contain changes in its amino acid residues that are essential for its activity and thus reduce, decrease, repress or delete its activity.

[0763] Such polypeptides differ in the amino acid sequence from a sequence as depicted in column 5 or 7 of table II, application no. 1, or comprising a consensus sequence or a polypeptide motif as depicted in column 7 of table IV, application no. 1, yet and confer an enhancement of yield, in particular a yield-related trait, e.g. nitrogen use efficiency and/or an increase in the biomass production as compared to a corresponding, e.g. non-transformed, wild type plant. The nucleic acid molecule can comprise a nucleotide sequence encoding a polypeptide, wherein the polypeptide comprises an amino acid sequence at least about 50% identical to an amino acid sequence as depicted in application no. 1 column 5 or 7 of table II or comprising a consensus sequence or a polypeptide motif as depicted in column 7 of table IV and is capable of participation in enhancement of yield, in particular a yield-related trait, e.g. nitrogen use efficiency and/or the increase of biomass production as compared to a corresponding, e.g. non-transformed, wild type plant after decreasing its expression or its biological function.

[0764] Preferably, the protein encoded by the nucleic acid molecule is at least about 60%, 70% or 80% identical to the sequence in column 5 or 7 of table II, application no. 1, or to a sequence comprising a consensus sequence or a polypeptide motif as depicted in column 7 of table IV, application no. 1, more preferably at least about 85% identical to one of the sequences in column 5 or 7 of table II, application no. 1, or to a sequence comprising a consensus sequence or a polypeptide motif as depicted in column 7 of table IV, application no. 4% 95% homologous to the sequence in column 5 or 7 of table I, application no. 1, or to a sequence comprising a consensus sequence or a polypeptide motif as depicted in column 7 of table IV, application no. 1, and most preferably at least about 96%, 97%, 98%, or 99% identical to the sequence in column 5 or 7 of able II, application no. 1, or to a sequence comprising a consensus sequence or a polypeptide motif as depicted in column 7 of table IV, application no. 1.

[0765] To determine the percentage homology (=identity) of two amino acid sequences (for example of column 7 of table II) or of two nucleic acid molecules (for example of column 5 or table I), the sequences are written one underneath the other for an optimal comparison. Gaps may be inserted into the sequence of a protein or of a nucleic acid molecule in order to generate an optimal alignment with the other protein or the other nucleic acid. The amino acid residue or nucleotide at the corresponding amino acid position or nucleotide position is then compared between both polymers. If a position in one sequence is occupied by the same amino acid residue or the same nucleotide as in the corresponding position of the other sequence, the molecules are identical at this position. Amino acid or nucleotide “identity” as used in the present context corresponds to amino acid or nucleic acid “homology”. Generally the percentage homology between the two sequences is a function of the number of identical positions shared by the sequences (i.e. % homology=number of identical positions/total number of positions×100). The terms “homology” and “identity” are thus to be considered as synonyms for this description.

[0766] For the determination of the percentage homology (=identity) of two or more amino acid or of two or more nucleotide sequences several computer software programs have been developed. The homology of two or more sequences can be calculated with for example the software fasta, which presently has been used in the version fasta 3 (Pearson W. R and Lipman D. J., PNAS 85, 2444 (1988); Pearson W. R., Methods in Enzymology 183, 63 (1990)). Another useful program for the calculation of homologies of different sequences is the standard blast program, which is included in the Biomax pedant software (Biomax, Munich, Federal Republic of Germany). This leads unfortunately sometimes to suboptimal results since blast does not always include complete sequences of the subject and the query. Nevertheless as this program is very efficient it can be used for the comparison of a huge number of sequences. The following settings are typically used for such a comparisons of sequences: —p Program Name [String]; —d Database [String]; default=nr; —i Query File [File In]; default=stdin; —e Expectation value (E) [Real]; default=10.0; —m alignment view options: 0=pairwise; 1=query-anchored showing identities; 2=query-anchored no identities; 3=flat query-anchored, show identities; 4=flat query-anchored, no identities; 5=query-anchored no identities and blunt ends; 6=flat query-anchored, no identities and blunt ends; 7=XML Blast output; 8=tabular; 9 tabular with comment lines [Integer]; default=0; —o BLAST report Output File [File Out] Optional; default=stdout; —F Filter query sequence (DUST with blastn, SEG with others) [String]; default=T; —G Cost to open a gap (zero invokes default behavior) [Integer]; default=0; —E Cost to extend a gap (zero invokes default behavior) [Integer]; default=0; —X X dropoff value for gapped alignment (in bits) (zero invokes default behavior); blastn 30, megablast 20, tblastx 0, all others 15 [Integer]; default=0; —I Show GI's in deflines [T/F]; default=F; —q Penalty for a nucleotide mismatch (blastn only) [Integer]; default=−3; —r Reward for a nucleotide match (blastn only) [Integer]; default=1; —v Number of database sequences to show one-line descriptions for (V) [Integer]; default=500; —b Number of database sequence to show alignments for (B) [Integer]; default=250; —f Threshold for extending hits, default if zero; blastp 11, blastn 0, blastx 12, tblastn 13; tblastx 13, megablast 0 [Integer]; default=0; —g Perfom gapped alignment (not available with tblastx) [T/F]; default=T; —Q Query Genetic code to use [Integer]; default=1; —D DB Genetic code (for tblast[nx] only) [Integer]; default=1; —a Number of processors to use [Integer]; default=1; —O SeqAlign file [File Out] Optional; —J Believe the query defline [T/F]; default=F; —M Matrix [String]; default=BLOSUM62; —W Word size, default if zero (blastn 11, megablast 28, all others 3) [Integer]; default=0; —z Effective length of the database (use zero for the real size) [Real]; default=0; —K Number of best hits from a region to keep (off by default, if used a value of 100 is recommended) [Integer]; default=0; —P 0 for multiple hit, 1 for single hit [Integer]; default=0; —Y Effective length of the search space (use zero for the real size) [Real]; default=0; —S Query strands to search against database (for blast[nx], and tblastx); 3 is both, 1 is top, 2 is bottom [Integer]; default=3; —T Produce HTML output [T/F]; default=F; —I Restrict search of database to list of GI's [String] Optional; -U Use lower case filtering of FASTA sequence [T/F] Optional; default=F; —y X dropoff value for ungapped extensions in bits (0.0 invokes default behavior); blastn 20, megablast 10, all others 7 [Real]; default=0.0; —Z X dropoff value for final gapped alignment in bits (0.0 invokes default behavior); blastn/megablast 50, tblastx 0, all others 25 [Integer]; default=0; —R PSI-TBLASTN checkpoint file [File In] Optional; —n MegaBlast search [T/F]; default=F; —L Location on query sequence [String] Optional; —A Multiple Hits window size, default if zero (blastn/megablast 0, all others 40 [Integer]; default=0; —w Frame shift penalty (OOF algorithm for blastx) [Integer]; default=0; —t Length of the largest intron allowed in tblastn for linking HSPs (0 disables linking) [Integer]; default=0.

[0767] Results of high quality are reached by using the algorithm of Needleman and Wunsch or Smith and Waterman. Therefore programs based on said algorithms are preferred. Advantageously the comparisons of sequences can be done with the program PileUp (J. Mol. Evolution., 25, 351 (1987), Higgins et al., CABIOS 5, 151 (1989)) or preferably with the programs “Gap” and “Needle”, which are both based on the algorithms of Needleman and Wunsch (J. Mol. Biol. 48; 443 (1970)), and “BestFit”, which is based on the algorithm of Smith and Waterman (Adv. Appl. Math. 2; 482 (1981)). “Gap” and “BestFit” are part of the GCG software-package (Genetics Computer Group, 575 Science Drive, Madison, Wis., USA 53711 (1991); Altschul et al., (Nucleic Acids Res. 25, 3389 (1997)), “Needle” is part of the The European Molecular Biology Open Software Suite (EMBOSS) (Trends in Genetics 16 (6), 276 (2000)). Therefore preferably the calculations to determine the percentages of sequence homology are done with the programs “Gap” or “Needle” over the whole range of the sequences. The following standard adjustments for the comparison of nucleic acid sequences were used for “Needle”: matrix: EDNAFULL, Gap_penalty: 10.0, Extend_penalty: 0.5. The following standard adjustments for the comparison of nucleic acid sequences were used for “Gap”: gap weight: 50, length weight: 3, average match: 10.000, average mismatch: 0.000.

[0768] For example a sequence, which has 80% homology with sequence SEQ ID NO: 27 at the nucleic acid level is understood as meaning a sequence which, upon comparison with the sequence SEQ ID NO: 27 by the above program “Needle” with the above parameter set, has a 80% homology.

[0769] Homology between two polypeptides is understood as meaning the identity of the amino acid sequence over in each case the entire sequence length which is calculated by comparison with the aid of the above program “Needle” using Matrix: EBLOSUM62, Gap_penalty: 8.0, Extend_penalty: 2.0.

[0770] For example a sequence which has a 80% homology with sequence SEQ ID NO: 28 at the protein level is understood as meaning a sequence which, upon comparison with the sequence SEQ ID NO: 28 by the above program “Needle” with the above parameter set, has a 80% homology.

[0771] Functional equivalents derived from one of the polypeptides as depicted column 5 or 7 of table II, application no. 1, or comprising the consensus sequence or the polypeptide motif as depicted in column 7 of table IV, application no. 1, according to the invention by substitution, insertion or deletion have at least 30%, 35%, 40%, 45% or 50%, preferably at least 55%, 60%, 65% or 70% by preference at least 80%, especially preferably at least 85% or 90%, 91%, 92%, 93% or 94%, very especially preferably at least 95%, 97%, 98% or 99% homology with one of the polypeptides as shown in column 5 or 7 of table II, application no. 1, or with one of the polypeptides comprising a consensus sequence or a polypeptide motif as depicted in column 7 of table IV, application no. 1, according to the invention and are distinguished by essentially the same properties as the polypeptide as depicted in column 5 or 7 of table II, application no. 1, preferably of the polypeptides of A. thaliana.

[0772] Functional equivalents derived from the nucleic acid sequence as depicted in column 5 or 7 of table I, application no. 1, according to the invention by substitution, insertion or deletion have at least 30%, 35%, 40%, 45% or 50%, preferably at least 55%, 60%, 65% or 70% by preference at least 80%, especially preferably at least 85% or 90%, 91%, 92%, 93% or 94%, very especially preferably at least 95%, 97%, 98% or 99% homology with one of the nucleic acids as depicted in column 5 or 7 of table I, application no. 1, according to the invention and encode polypeptides having essentially the same properties as the polypeptide as depicted in column 5 of table II, application no. 1.

[0773] Essentially the same properties” of a functional equivalent is above all understood as meaning that the functional equivalent has above mentioned activity, e.g conferring an enhancement of yield, in particular a yield-related trait, e.g. nitrogen use efficiency and/or an increase in biomass production as compared to a corresponding, e.g. non-transformed, wild type plant while decreasing the amount of protein, activity or function of said functional equivalent in an organism, e.g. a plant or in a plant tissue, plant cells or a part of the same.

[0774] A nucleic acid molecule encoding an homologous to a protein sequence shown herein can be created by introducing one or more nucleotide substitutions, additions or deletions into a nucleotide sequence of a nucleic acid molecule comprising the nucleic acid molecule as depicted in column 5 or 7 of table I such that one or more amino acid substitutions, additions or deletions are introduced into the encoded protein. Mutations can be introduced into the sequences of, e.g. the sequences as depicted in column 5 or 7 of table I, by standard techniques, such as site-directed mutagenesis and PCR-mediated mutagenesis.

[0775] Preferably, non-conservative amino acid substitutions are made at one or more predicted non-essential or preferably essential amino acid residues and thereby reducing, decreasing or deleting the activity of the respective protein. A “conservative amino acid substitution” is one in which the amino acid residue is replaced with an amino acid residue having a similar side chain. Families of amino acid residues having similar side chains have been defined in the art. These families include amino acids with basic side chains (e.g., lysine, arginine, histidine), acidic side chains (e.g., aspartic acid, glutamic acid), uncharged polar side chains (e.g., glycine, asparagine, glutamine, serine, threonine, tyrosine, cysteine), nonpolar side chains (e.g., alanine, valine, leucine, isoleucine, proline, phenylalanine, methioninemethionine, tryptophan), beta-branched side chains (e.g., threonine, valine, isoleucine) and aromatic side chains (e.g., tyrosine, phenylalanine, tryptophan, histidine).

[0776] Thus, a predicted essential amino acid residue in a polypeptide used in the process or in the polypeptide of the invention, is preferably replaced with another amino acid residue from another family. Alternatively, in another embodiment, mutations can be introduced randomly along all or part of a coding sequence of a nucleic acid molecule coding for a polypeptide used in the process of the invention or a polynucleotide of the invention such as by saturation mutagenesis, and the resultant mutants can be screened for activity described herein to identify mutants that lost or have a decreased activity and conferring an increased yield, in particular an increased yield-related trait, e.g. an increased nutrient use efficiency, such as an enhanced nitrogen use efficiency and/or increased tolerance to environmental stress and/or increased biomass production as compared to a corresponding, e.g. non-transformed, wild type plant.

[0777] Following mutagenesis of one of the sequences of column 5 or 7 of table I, the encoded protein can be expressed recombinantly and the activity of the protein can be determined using, for example, assays described herein.

[0778] Essentially homologous polynucleotides of the nucleic acid molecule shown herein for the process according to the invention and being indicated in column 5 of table I were found by BlastP database search with the corresponding polypeptide sequences. The SEQ ID No: of the found homologous sequences of a nucleic acid molecule indicated in column 5 of table I are shown in column 7 of table I in the respective same line. The SEQ ID No: of the found homologous sequences of a protein molecule indicated in column 5 of table II are depicted in column 7 of table II in the respective same line.

[0779] The protein sequence of a nucleic acid molecule depicted in column 5 and table I were used to search protein databases using the tool BlastP. Homologous protein sequences were manually selected according to their similarity to the query protein sequence. The nucleotide sequence corresponding to the selected protein sequence is specified in the header section of the protein database entry in most cases and was used if present. If a protein database entry did not provide a direct cross-reference to the corresponding nucleotide database entry, the sequence search program TBlastN was used to identify nucleotide database entries from the same organism encoding exactly the same protein (100% identity). The expectation value was set to 0.001 in TBlastN and the blosum62 matrix was used; all other parameters were used in its default settings.

[0780] Further, the protein patterns defined for the protein sequences depicted in column 5 and 7 table II were used to search protein databases. Protein sequences exhibiting all protein patterns depicted in column 7 of table IV were aligned with the protein sequence depicted in column 5 and 7 table II of the respective same line and selected as homologous proteins if significant similarity was observed.

[0781] Homologues of the nucleic acid sequences used, having or being derived from a sequence as depicted in column 5 or 7 of table I, application no. 1, or of the nucleic acid sequences derived from the sequences as depicted in column 5 or 7 of table II, application no. 1, or from the sequence comprising the consensus sequences or the polypeptide motifs as depicted in column 7 of table IV, application no. 1, comprise also allelic variants with at least approximately 30%, 35%, 40% or 45% homology, by preference at least approximately 50%, 60% or 70%, more preferably at least approximately 90%, 91%, 92%, 93%, 94% or 95% and even more preferably at least approximately 96%, 97%, 98%, 99% or more homology with one of the nucleotide sequences shown or the abovementioned derived nucleic acid sequences or their homologues, derivatives or analogues or parts of these.

[0782] Allelic variants encompass in particular functional variants which can be obtained by deletion, insertion or substitution of nucleotides from the sequences shown or used in the process of the invention, preferably as depicted in column 5 or 7 of table I, application no. 1, or from the derived nucleic acid sequences.

[0783] In one embodiment, however, the enzyme activity or the activity of the resulting proteins synthesized is advantageously lost or decreased, e.g. by mutation of sequence as described herein or by applying a method to reduce or inhibit or loose the biological activity as described herein.

[0784] In one embodiment of the present invention, the nucleic acid molecule used in the process of the invention or the nucleic acid molecule of the invention comprises a sequence as depicted in column 5 or 7 of table I, application no. 1, or its complementary sequence. It can be preferred that a homologue of a nucleic acid molecule as depicted in column 5 or 7 of table I, application no. 1, comprises as little as possible other nucleotides compared to the sequence as depicted in column 5 or 7 of table I, application no. 1, or its complementary sequence. In one embodiment, the nucleic acid molecule comprises less than 500, 400, 300, 200, 100, 90, 80, 70, 60, 50 or 40 further or other nucleotides. In a further embodiment, the nucleic acid molecule comprises less than 30, 20 or 10 further or other nucleotides. In one embodiment, the nucleic acid molecule use in the process of the invention is identical to the sequences as depicted in column 5 or 7 of table I, application no. 1, or its complementary sequence.

[0785] Also preferred is that the nucleic acid molecule used in the process of the invention encodes a polypeptide comprising the sequence, a consensus sequence or a polypeptide motif as depicted in column 5 or 7 of table II or IV, application no. 1. In one embodiment, the nucleic acid molecule encodes less than 150, 130, 100, 80, 60, 50, 40 or 30 further or other amino acids. In a further embodiment, the encoded polypeptide comprises less than 20, 15, 10, 9, 8, 7, 6 or 5 further or other amino acids. In one embodiment used in the inventive process, the encoded polypeptide is identical to the sequences as depicted in column 5 or 7 of table II.

[0786] In one embodiment, the nucleic acid molecule used in the process of invention encoding a polypeptide comprising a sequence, a consensus sequence or a polypeptide motif as depicted in column 5 or 7 of table II or IV, application no. 1, comprises less than 100 further or other nucleotides different from the sequence shown in column 5 or 7 of table I, application no. 1. In a further embodiment, the nucleic acid molecule comprises less than 30 further or other nucleotides different from the sequence as depicted in column 5 or 7 of table I, application no. 1. In one embodiment, the nucleic acid molecule is identical to a coding sequence of the sequences as depicted in column 5 or 7 of table I, application no. 1.

[0787] Homologues of sequences depicted in column 5 or 7 of table I, application no. 1, or of the derived sequences from the sequences as depicted in column 5 or 7 of table II, application no. 1, or from sequences comprising the consensus sequences or the polypeptide motifs as depicted in column 7 of table IV, application no. 1, also mean truncated sequences, cDNA, single-stranded DNA or RNA of the coding and noncoding DNA sequence. Homologues of the sequences as depicted in the column 5 or 7 of table I, application no. 1, or the derived sequences of the sequences as depicted in column 5 or 7 of table II, application no. 1, or from sequences comprising the consensus sequences or the polypeptide motifs as depicted in column 7 of table IV, application no. 1, are also understood as meaning derivatives which comprise noncoding regions such as, for example, UTRs, terminators, enhancers or promoter variants.

[0788] The regulatory sequences upstream or downstream of the nucleotide sequences stated can be modified by one or more nucleotide substitution(s), insertion(s) and/or deletion(s) with, however, preferably interfering with the functionality or activity either of the promoters, the open reading frame (═ORF) or with the 3′-regulatory region such as terminators or other 3′ regulatory regions, which are far away from the ORF. It is furthermore possible that the activity of the promoters is decreased by modification of their sequence or their regulation, or that they are replaced completely by less active promoters and thereby the activity of the expressed nucleic acid sequence is reduced or deleted, even promoters from heterologous organisms can be used. Appropriate promoters are known to the person skilled in the art and are mentioned herein below. Modifying the regulatory sequences might be specifically advantageous in those cases were a complete elimination of the expression of the nucleic acid of the invention has negative side effects, such as reduced growth or yield. The person skilled in the art is able to modify the regulatory sequences of the nucleic acid of the invention in such a way that the reduction is sufficient to yield the increased yield, in particular an increased yield-related trait, e.g. an increased nutrient use efficiency, such as an enhanced nitrogen use efficiency and/or increased tolerance to environmental stress and/or increased biomass production as compared to a corresponding, e.g. non-transformed, wild type plant without having unwanted side effects. In this context it might be further advantageously to modify the regulatory sequences in such a way that the reduction in expression occurs in a spatial or temporal manner. For example, it might be useful to inhibit, downregulate or repress the nucleic acids or the polypeptide of the invention only in the mature state of the plant, to achieve the desired increased yield, in particular an increased yield-related trait, e.g. an increased nutrient use efficiency, such as an enhanced nitrogen use efficiency and/or increased tolerance to environmental stress and/or increased biomass production as compared to a corresponding, e.g. non-transformed, wild type plant without interfering with the growth or maturation of the organism. Further methods exists to modulate the promoters of the genes of the invention, e.g. by modifying the activity of transacting factors, meaning natural or artificial transcription factors, which can bind to the promoter and influence its activity. Furthermore it is possible to influence promoters of interest by modifying upstream signaling components like receptors or kinases, which are involved in the regulation of the promoter of interest.

[0789] In a further embodiment, the process according to the present invention comprises the following steps:
[0790] (a) selecting an organism or a part thereof expressing the polypeptide or nucleic acid molecule which activity is reduced in the process of the invention, e.g. a polypeptide comprising a polypeptide, a consensus sequence or a polypeptide motif as depicted in column 5 or 7 of table II or IV, application no. 1, or a nucleic acid molecule comprising a nucleic acid molecule as depicted in column 5 or 7 of table I, application no. 1;
[0791] (b) mutagenizing the selected organism or the part thereof;
[0792] (c) comparing the activity or the expression level of said polypeptide or nucleic acid molecule in the mutagenized organism or the part thereof with the activity or the expression of said polypeptide in the selected organisms or the part thereof;
[0793] (d) selecting the mutagenized organisms or parts thereof, which comprise a decreased activity or expression level of said polypeptide compared to the selected organism (a) or the part thereof;
[0794] (e) optionally, growing and cultivating the organisms or the parts thereof; and
[0795] (f) testing, whether the organism or the part thereof has an increased yield, in particular an increased yield-related trait, e.g. an increased nutrient use efficiency, such as an enhanced nitrogen use efficiency and/or increased tolerance to environmental stress and/or increased biomass production as compared to a corresponding, e.g. non-transformed, wild type plant, such as a not mutagenized source or origin strain.

[0796] Advantageously the selected organisms were mutagenized according to the invention. According to the invention mutagenesis is any change of the genetic information in the genome of an organism, that means any structural or compositional change in the nucleic acid preferably DNA of an organism that is not caused by normal segregation or genetic recombination processes. Such mutations may occur spontaneously, or may be induced by mutagens as described below. Such change can be induced either randomly or selectively. In both cases the genetic information of the organism is modified. In general this leads to the situation that the activity of the gene product of the relevant genes inside the cells or inside the organism is reduced or repressed.

[0797] In case of the specific or so-called site directed mutagenesis a distinct gene is mutated and thereby its activity and/or the activity or the encoded gene product is repressed, reduced, decreased or deleted. In the event of a random mutagenesis one or more genes are mutated by chance and their activities and/or the activities of their gene products are repressed, reduced, decreased or deleted, preferably decreased or deleted. Nevertheless mutations in the gene of interest can be selected for by various methods known to the person skilled in the art.

[0798] For the purpose of a mutagenesis of a huge population of organisms, such population can be transformed with a DNA population or a DNA bank or constructs or elements, which are useful for the inhibition of as much as possible genes of an organism, preferably all genes. With this method it is possible to statistically mutagenize nearly all genes of an organism by the integration of an advantageously identified DNA-fragment. Afterwards the skilled worker can easily identify the knocked out event. For the mutagenesis of plants EMS, T-DNA and/or transposon mutagenesis is preferred.

[0799] In the event of a random mutagenesis a huge number of organisms are treated with a mutagenic agent. The amount of said agent and the intensity of the treatment is chosen in such a manner that statistically nearly every gene is mutated. The process for the random mutagensis as well as the respective agents is well known by the skilled person. Such methods are disclosed for example by van Harten A. M. (“Mutation breeding: theory and practical applications”, Cambridge University Press, Cambridge, UK (1998)], Friedberg E., Walker G., Siede W. (“DNA Repair and Mutagenesis”, Blackwell Publishing (1995)], or Sankaranarayanan K., Gentile J. M., Ferguson L. R. (“Protocols in Mutagenesis”, Elsevier Health Sciences (2000)). As the skilled worker knows the spontaneous mutation rate in the cells of an organism is very low and that a large number of chemical, physical or biological agents are available for the mutagenesis of organisms. These agents are named as mutagens or mutagenic agents. As mentioned before three different kinds of mutagens chemical, physical or biological agents are available.

[0800] There are different classes of chemical mutagens, which can be separated by their mode of action. For example base analogues such as 5-bromouracil, 2-amino purin. Other chemical mutagens are interacting with the DNA such as sulphuric acid, nitrous acid, hydroxylamine; or other alkylating agents such as monofunctional agents like ethyl methanesulfonate (=EMS), dimethylsulfate, methyl methanesulfonate, bifunctional like dichloroethyl sulphide, Mitomycin, Nitrosoguanidine—dialkylnitrosamine, N-Nitrosoguanidin derivatives, N-alkyl-N-nitro-N-nitroso-guanidine, intercalating dyes like Acridine, ethidium bromide.

[0801] Physical mutagens are for example ionizing irradiation (X-ray), UV irradiation. Different forms of irradiation are available and they are strong mutagens. Two main classes of irradiation can be distinguished: a) non-ionizing irradiation such as UV light or ionizing irradiation such as X-ray. Biological mutagens are for example transposable elements for example IS elements such as IS100, transposons such as Tn5, Tn10, Tn903, Tn916 or Tn1000 or phages like Muamplac, P1, T5, λplac etc. Methods for introducing this phage DNA into the appropriate microorganism are well known to the skilled worker (see Microbiology, Third Edition, Eds. Davis B. D., Dulbecco R., Eisen H. N. and Ginsberg H. S., Harper International Edition, 1980). The common procedure of a transposon mutagenesis is the insertion of a transposable element within a gene or nearby for example in the promotor or terminator region and thereby leading to a loss of the gene function. Procedures to localize the transposon within the genome of the organisms are well known by a person skilled in the art. For transposon mutagenesis in plants the maize transposon systems Activator-Dissociation (Ac/Ds) and Enhancer-Supressor mutator (En/Spm) are known to the worker skilled in the art but other transposon systems might be similar useful. The transposons can be brought into the plant genomes by different available standard techniques for plant transformations. Another type of biological mutagenesis in plants includes the T-DNA mutagenesis, meaning the random integration of T-DNA sequences into the plant genome (Feldmann K. A., Plant J. 1, 71 (1991)). The event in which the gene of interest is mutated can later be searched by PCR- or other high throughput technologies (Krysan et al., Plant Cell 11, 2283 (1999)).

[0802] Biological methods are disclosed by Spee et al. (Nucleic Acids Research, 21 (3), 777 (1993)). Spee et al. teaches a PCR method using dITP for the random mutagenesis. This method described by Spee et al. was further improved by Rellos et al. (Protein Expr. Purif. 5, 270 (1994)). The use of an in vitro recombination technique for molecular mutagenesis is described by Stemmer (Proc. Natl. Acad. Sci. USA 91, 10747 (1994)). Moore et al. (Nature Biotechnology 14, 458 (1996)) describe the combination of the PCR and recombination methods for increasing the enzymatic activity of an esterase toward a para-nitrobenzyl ester. Another route to the mutagenesis of enzymes is described by Greener et al. in Methods in Molecular Biology (57, 375 (1996)). Greener et al. use the specific Escherichia coli strain XL1-Red to generate Escherichia coli mutants, which have increased antibiotic resistance.

[0803] Preferably a chemical or biochemical procedure is used for the mutagenesis of the organisms. A preferred chemical method is the mutagenesis with N-methyl-N-nitro-nitrosoguanidine.

[0804] Other methods are for example the introduction of mutation with the aid of viruses such as bacteriophages such as P1, P22, T2, T3, T5, T7, Muamplac, Mu, Mu1, MuX, miniMu, λ, λplac or insertion elements such as IS3, IS100, IS900 etc. Again the whole genome of the bacteria is randomly mutagenized. Mutants can be easily identified.

[0805] Another method to disrupt the nucleic acid sequence used in the process of the invention and thereby reducing, decreasing or deleting the activity of the encoded polypeptide can be reached by homologous recombination with an little altered nucleic acid sequence of the invention described herein as usable for the process of the invention, e.g. derived from the sequence shown in column 5 or 7 of table I. For example, the nucleic acid sequences used in the process of the invention can therefore be altered by one or more point mutations, deletions, insertions, or inversions. In another embodiment of the invention, one or more of the regulatory regions (e.g., a promoter, repressor, UTR, enhancer, or inducer) of the gene encoding the protein of the invention can be altered (e.g., by deletion, truncation, inversion, insertion, or point mutation) such that the expression of the corresponding gene is modulated that means reduced, decreased or deleted.

[0806] Accordingly, in one embodiment, the invention relates to an isolated nucleic acid molecule encoding an antisense, RNAi, snRNA, dsRNA, siRNA, miRNA, ta-siRNA, cosuppression molecule, or ribozyme molecule of the invention or the cosuppression nucleic acid molecule or the viral degradation nucleic acid molecule of the invention or encoding a DNA-, RNA- or protein-binding factor against genes, RNA's or proteins, a dominant negative mutant, or an antibody of the invention or the nucleic acid molecule for a recombination of the invention, in particular the nucleic acid molecule for a homologous recombination, comprising at least a fragment of 15, 16, 17, 18, 19, 20, 21, 25, 30, 35, 40, 50, 70, 100, 200, 300, 500, 1000, 2000 or more nucleotides of a nucleic acid molecule selected from the group consisting of:
[0807] (a) a nucleic acid molecule encoding the polypeptide as depicted in column 5 or 7 of table II, application no. 1, preferably of table II B, application no. 1, or encompassing a consensus sequence or a polypeptide motif as depicted in column 7 table IV, application no. 1,
[0808] (b) a nucleic acid molecule as depicted in column 5 or 7 of table I, application no. 1, preferably of table I B, application no. 1;
[0809] (c) a nucleic acid molecule, which, as a result of the degeneracy of the genetic code, can be derived from a polypeptide sequence as depicted in column 5 or 7 of table II, application no. 1, preferably of table II B, application no. 1;
[0810] (d) a nucleic acid molecule having at least 30% identity, preferably at least 40%, 50%, 60%, 70%, 75%, 80%, 85%, 90%, 95%, 96%, 97%, 98%, 99%, 99.5%, with the nucleic acid molecule sequence of a polynucleotide comprising the nucleic acid molecule as depicted in column 5 or 7 of table I, application no. 1, preferably of table I B, application no. 1;
[0811] (e) a nucleic acid molecule encoding a polypeptide having at least 30% identity, preferably at least 40%, 50%, 60%, 70%, 75%, 80%, 85%, 90%, 95%, 96%, 97%, 98%, 99%, 99.5%, with the amino acid sequence of the polypeptide encoded by the nucleic acid molecule of (a), (b) or (c) and having the activity represented by a protein as depicted in column 5 of table II, application no. 1;
[0812] (f) a nucleic acid molecule encoding a polypeptide which is isolated with the aid of monoclonal or polyclonal antibodies directed against a polypeptide encoded by one of the nucleic acid molecules of (a), (b), (c), (d) or (e) and having the activity represented by the protein as depicted in column 5 or 7 of table II, application no. 1;
[0813] (g) a nucleic acid molecule encoding a polypeptide comprising the consensus sequence or polypeptide motif as depicted in column 7 of table IV, application no. 1;
[0814] (h) a nucleic acid molecule encoding a polypeptide having the activity represented by the protein as depicted in column 5 of table II, application no. 1;
[0815] (i) nucleic acid molecule which comprises a polynucleotide, which is obtained by amplifying a cDNA library or a genomic library using the primers as depicted in column 7 of table III, application no. 1, which do not start at their 5 prime end with the nucleotides ATA;
[0816] (j) nucleic acid molecule encoding a polypeptide, the polypeptide being derived by substituting, deleting and/or adding one or more amino acids of the amino acid sequence of the polypeptide encoded by the nucleic acid molecules (a), (b), (c), (d), (e), (f), (g), (h) or (i); and
[0817] (k) a nucleic acid molecule which is obtainable by screening a suitable nucleic acid library under stringent hybridization conditions with a probe comprising a complementary sequence of a nucleic acid molecule of (a) or (b) or with a fragment thereof, having at least 15 nt, preferably 20 nt, 30 nt, 50 nt, 100 nt, 200 nt, 500 nt, 750 nt or 1000 nt of a nucleic acid molecule complementary to a nucleic acid molecule sequence characterized in (a) to (d) and encoding a polypeptide having the activity represented by a protein as depicted in column 5 table II, application no. 1;
   or which comprises a sequence which is complementary thereto;
   whereby the antisense, RNAi, snRNA, dsRNA, siRNA, miRNA, ta-siRNA, cosuppression molecule, or ribozyme nucleic acid molecule differs at least in one, five, ten, 20, 50, 100 or more nucleotides from the sequence as depicted in column 5 or 7 of table I A, application no. 1.

[0818] In a preferred embodiment, the term “the nucleic acid molecule used in the process of the invention” as used herein relates to said nucleic acid molecule which expression confers the reduction, repression or deletion of the activity selected from the group consisting of At1g74730-protein, At3g63270-protein, protein kinase, protein serine/threonine phosphatase, and/or SET domain-containing protein.

[0819] In a more preferred embodiment, the term “the nucleic acid molecule used in the process of the invention” as used herein relates to the nucleic acid molecule which expression confers the reduction, repression or deletion of the activity represented by a nucleic acid molecule comprising a nucleic acid molecule as depicted in column 5 or 7 of table I, application no. 1, or represented by a polypeptide comprising a polypeptide, a consensus sequence or a polypeptide motif as depicted in column 5 or 7 of table II or IV, application no. 1.

[0820] In an even more preferred embodiment, the term “the nucleic acid molecule used in the process of the invention” relates to the antisense, RNAi, snRNA, dsRNA, siRNA, miRNA, ta-siRNA, cosuppression molecule, or ribozyme molecule of the invention or the cosuppression nucleic acid molecule or the viral degradation nucleic acid molecule of the invention or encoding a DNA-, RNA- or protein-binding factor against genes, RNA's or proteins, a dominant negative mutant, or an antibody of the invention or the nucleic acid molecule for a recombination of the invention, in particular the nucleic acid molecule for producing a homologous recombination event.

[0821] The nucleic acid sequences used in the process are advantageously introduced in a nucleic acid construct, preferably an expression cassette, which allows the reduction, depression etc. of the nucleic acid molecules in an organism, advantageously a plant or a microorganism.

[0822] Accordingly, the invention also relates to a nucleic acid construct, preferably to an expression construct, comprising the nucleic acid molecule used in the process of the present invention or a fragment thereof functionally linked to one or more regulatory elements or signals. Furthermore the invention also relates to a nucleic acid constructs for the production of homologous recombination events, comprising the nucleic acids molecule used in the process of the present invention or parts thereof.

[0823] As described herein, the nucleic acid construct can also comprise further genes, which are to be introduced into the organisms or cells. It is possible and advantageous to introduce into, and express in, the host organisms regulatory genes such as genes for inductors, repressors or enzymes, which, owing to their enzymatic activity, engage in the regulation of one or more genes of a biosynthetic pathway. These genes can be of heterologous or homologous origin. Moreover, further biosynthesis genes may advantageously be present, or else these genes may be located on one or more further nucleic acid constructs.

[0824] As described herein, regulator sequences or factors can have a positive effect on preferably the expression of the constructs introduced, thus increasing it. Thus, an enhancement of the regulator elements may advantageously take place at the transcriptional level by using strong transcription signals such as promoters and/or enhancers. In addition, however, an enhancement of translation is also possible, for example by increasing RNA stability. On the other hand the nucleic acid molecule described herein to be reduces according to the process of the invention and the gene products are reduced, decreased or deleted to enhance the yield, in particular a yield-related trait, e.g. nitrogen use efficiency and/or increase the biomass production as compared to a corresponding, e.g. non-transformed, wild type plant.

[0825] In principle, the nucleic acid construct can comprise the herein described regulator sequences and further sequences relevant for the reduction of the expression of nucleic acid molecules to be reduced according to the process of the invention and on the other side for the expression of additional genes in the construct.

[0826] Thus, the nucleic acid construct of the invention can be used as expression cassette and thus can be used directly for introduction into the plant, or else they may be introduced into a vector. Accordingly in one embodiment the nucleic acid construct is an expression cassette comprising a microorganism promoter or a microorganism terminator or both. In another embodiment the expression cassette encompasses a plant promoter or a plant terminator or both.

[0827] Accordingly, in one embodiment, the process according to the invention comprises the following steps:
[0828] (a) introduction of a nucleic acid construct comprising a nucleic acid molecule to be used in the process of the invention, e.g. which encodes an antisense, RNAi, snRNA, dsRNA, siRNA, miRNA, ta-siRNA, cosuppression molecule, or ribozyme molecule of the invention or the cosuppression nucleic acid molecule or the viral degradation nucleic acid molecule of the invention or encoding a DNA-, RNA- or protein-binding factor against genes, RNA's or proteins, a dominant negative mutant, or an antibody of the invention or which is suitable for a recombination, in particular a homologous recombination; or
[0829] (b) introduction of a nucleic acid molecule, including regulatory sequences or factors, which expression increases the expression (a);
   in a cell, or an organism or a part thereof, preferably in a plant or plant cell, and
[0830] (c) repressing, reducing or deleting the activity to be reduced in the process of the invention by the nucleic acid constructor the nucleic acid molecule mentioned under (a) or (b) in the cell or the organism or a part thereof, preferably in a plant or plant cell.

[0831] After the introduction and expression of the nucleic acid construct the transgenic organism or cell is advantageously cultured and subsequently harvested. The transgenic organism or cell may be a eukaryotic organism such as a plant, a plant cell, a plant tissue, preferably a crop plant, or a part thereof.

[0832] To introduce a nucleic acid molecule for the reduction or repression of a polynucleotide or gene comprising a nucleic acid molecule shown in column 5 or 7 of table I, application no. 1, or a homologue thereof, or a gene product of said polynucleotide, for e.g. which encodes an antisense, RNAi, snRNA, dsRNA, siRNA, miRNA, ta-siRNA, cosuppression molecule, or ribozyme molecule of the invention or the cosuppression nucleic acid molecule or the viral degradation nucleic acid molecule of the invention or encoding a DNA, RNA- or protein-binding factor against genes, RNA's or proteins, a dominant negative mutant, or an antibody of the invention or which is suitable for a recombination, in particular a homologous recombination or a mutagenized nucleic acid sequence, into a nucleic acid construct, e.g. as part of an expression cassette, which leads to a reduced activity and/or expression of the respective gene, the codogenic gene segment or the untranslated regions are advantageously subjected to an amplification and ligation reaction in the manner known by a skilled person. It is preferred to follow a procedure similar to the protocol for the Pfu DNA polymerase or a Pfu/Taq DNA polymerase mixture. The primers are selected according to the sequence to be amplified. The specific cloning of antisense, RNAi, snRNA, dsRNA, siRNA, miRNA, ta-siRNA, cosuppression constructs, or ribozyme molecules of the invention or the cosuppression constructs or the viral degradation constructors or constructs encoding a DNA-, RNA- or protein-binding factor against genes, RNAs or proteins, or constructs for a dominant negative mutant, or an antibody of the invention or of constructs which are suitable for a recombination, in particular a homologous recombination are known to the person skilled in the art. Suitable cloning vectors are generally known to the skilled worker (Cloning Vectors (Eds. Pouwels P. H. et al. Elsevier, Amsterdam-New York-Oxford, 1985, ISBN 0 444 904018)) and have been published, e.g. Earley et al., Plant J. 45 (4), 616 (2006); Lu et al., Nucleic Acids Res. 32 (21), e171 (2004); Tao and Xhou, Plant J. 38 (5), 850 (2004); Miki and Shimamoto Plant Cell Physiol. 45 (4), 490 (2004); Akashi et al., Methods Mol. Biol. 252, 533 (2004); Wesley et al., Plant J. 27 (6: 581 (2001).

[0833] They include, in particular, vectors which are capable of replication in easy to handle cloning systems like bacterial yeast or insect cell based (e.g. baculovirus expression) systems, that is to say especially vectors which ensure efficient cloning in E. coli, and which make possible the stable transformation of plants. Vectors, which must be mentioned, in particular are various binary and cointegrated vector systems, which are suitable for the T-DNA-mediated transformation. Such vector systems are generally characterized in that they contain at least the vir genes, which are required for the Agrobacterium-mediated transformation, and the T-DNA border sequences.

[0834] In general, vector systems preferably also comprise further cis-regulatory regions such as promoters and terminators and/or selection markers by means of which suitably transformed organisms can be identified. While vir genes and T-DNA sequences are located on the same vector in the case of cointegrated vector systems, binary systems are based on at least two vectors, one of which bears vir genes, but no T-DNA, while a second one bears T-DNA, but no vir gene. Owing to this fact, the last-mentioned vectors are relatively small, easy to manipulate and capable of replication in E. coli and in Agrobacterium. These binary vectors include vectors from the series pBIB-HYG, pPZP, pBecks, pGreen. Those, which are preferably used in accordance with the invention, are Bin19, pBI101, pBinAR, pSun, pGPTV and pCAMBIA. An overview of binary vectors and their use is given by Hellens et al, Trends in Plant Science 5, 446 (2000).

[0835] For a construct preparation, vectors may first be linearized using restriction endonuclease(s) and then be modified enzymatically in a suitable manner. Thereafter, the vector is purified, and an aliquot is employed in the cloning step. In the cloning step, the enzyme-cleaved and, if required, purified amplificate is cloned together with similarly prepared vector fragments, using ligase. Alternatively constructs can be prepared be recombination or ligation independent cloning procedure, known to the person skilled in the art. Generally, a specific nucleic acid construct, or vector or plasmid construct, may have one or else more nucleic acid fragments segments. The nucleic acid fragments in these constructs are preferably linked operably to regulatory sequences. The regulatory sequences include, in particular, plant sequences like the above-described promoters and terminators. The constructs can advantageously be propagated stably in microorganisms, in particular Escherichia coli and/or Agrobacterium tumefaciens, under selective conditions and enable the transfer of heterologous DNA into plants or other microorganisms. In accordance with a particular embodiment, the constructs are based on binary vectors (overview of a binary vector: Hellens et al., 2000). As a rule, they contain prokaryotic regulatory sequences, such as replication origin and selection markers, for the multiplication in microorganisms such as Escherichia coli and Agrobacterium tumefaciens. Vectors can further contain agrobacterial T-DNA sequences for the transfer of DNA into plant genomes or other eukaryotic regulatory sequences for transfer into other eukaryotic cells, e.g. Saccharomyces sp. or other prokaryotic regulatory sequences for the transfer into other prokaryotic cells, e.g. Corynebacterium sp. or Bacillus sp. For the transformation of plants, at least the right border sequence, which comprises approximately 25 base pairs, of the total agrobacterial T-DNA sequence is required. Usually, the plant transformation vector constructs according to the invention contain T-DNA sequences both from the right and from the left border region, which contain expedient recognition sites for site-specific acting enzymes, which, in turn, are encoded by some of the vir genes. Different types of repression constructs, e.g. antisense, cosuppression, RNAi, miRNA and so forth need different cloning strategies as described herein.

[0836] Advantageously preferred in accordance with the invention are plants host organisms. Preferred plants are selected from among the families Aceraceae, Anacardiaceae, Apiaceae, Asteraceae, Apiaceae, Betulaceae, Boraginaceae, Brassicaceae, Bromeliaceae, Cactaceae, Caricaceae, Caryophyllaceae, Cannabaceae, Convolvulaceae, Chenopodiaceae, Elaeagnaceae, Geraniaceae, Gramineae, Juglandaceae, Lauraceae, Leguminosae, Linaceae, Cucurbitaceae, Cyperaceae, Euphorbiaceae, Fabaceae, Malvaceae, Nymphaeaceae, Papaveraceae, Rosaceae, Salicaceae, Solanaceae, Arecaceae, Iridaceae, Liliaceae, Orchidaceae, Gentianaceae, Labiaceae, Magnoliaceae, Ranunculaceae, Carifolaceae, Rubiaceae, Scrophulariaceae, Ericaceae, Polygonaceae, Violaceae, Juncaceae, Poaceae, perennial grass, fodder crops, vegetables and ornamentals.

[0837] Especially preferred are plants selected from the groups of the families Apiaceae, Asteraceae, Brassicaceae, Cucurbitaceae, Fabaceae, Papaveraceae, Rosaceae, Solanaceae, Liliaceae or Poaceae. Especially advantageous are, in particular, crop plants. Accordingly, an advantageous plant preferably belongs to the group of the genus peanut, oilseed rape, canola, sunflower, safflower, olive, sesame, hazelnut, almond, avocado, bay, pumpkin/squash, linseed, soya, pistachio, borage, maize, wheat, rye, oats, sorghum and millet, triticale, rice, barley, cassaya, potato, sugarbeet, fodder beet, egg plant, and perennial grasses and forage plants, oil palm, vegetables (brassicas, root vegetables, tuber vegetables, pod vegetables, fruiting vegetables, onion vegetables, leafy vegetables and stem vegetables), buckwheat, Jerusalem artichoke, broad bean, vetches, lentil, alfalfa, dwarf bean, lupin, clover and lucerne.

[0838] In one embodiment of the invention host plants are selected from the group comprising corn, soy, oil seed rape (including canola and winter oil seed reap), cotton, wheat and rice.

[0839] Further preferred plants are mentioned above.

[0840] In order to reduce or repress the activity of a gene product according to the process of the invention by introducing, into a plant the nucleic acid molecule used in the process of the invention, for example an isolated antisense, RNAi, snRNA, dsRNA, siRNA, miRNA, ta-siRNA, cosuppression molecule, or ribozyme molecule or a cosuppression nucleic acid molecule or a viral degradation nucleic acid molecule or a recombination nucleic acid molecule or a mutagenized nucleic acid sequence, advantageously is first transferred into an intermediate host, for example a bacterium or a eukaryotic unicellular cell. The transformation into E. coli, which can be carried out in a manner known per se, for example by means of heat shock or electroporation, has proved itself expedient in this context.

[0841] The nucleic acid constructs, which are optionally verified, are subsequently used for the transformation of the plants. To this end, it may first be necessary to obtain the constructs from the intermediate host. For example, the constructs may be obtained as plasmids from bacterial hosts by a method similar to conventional plasmid isolation.

[0842] Gene silencing in plants can advantageously achieved by transient trans-formation technologies, meaning that the nucleic acids are preferably not integrated into the plant genome. Suitable systems for transient plant transformations are for example agrobacterium based and plant virus based systems. Details about virus based transient systems and their use for gene silencing in plants have been described in Lu et al. in Methods 30 (4), 296 (2003). The use of agrobacterium for the transient expression of nucleic acids in plants have been described for example by Fuentes et al., in Biotechnol Appl Biochem. online: doi:10.1042/BA20030192 (2003 Nov. 21)).

[0843] A large number of methods for the transformation of plants are known. Since, in accordance with the invention, a stable integration of heterologous DNA into the genome of plants is advantageous, the T-DNA-mediated transformation has proved expedient in particular. For this purpose, it is first necessary to transform suitable vehicles, in particular agrobacteria, with a gene segment or the corresponding plasmid construct comprising the nucleic acid molecule to be transformed, e.g. a nucleic acid molecule suitable for the process of invention, e.g. as described herein, e.g. an isolated antisense, RNAi, snRNA, dsRNA, siRNA, miRNA, ta-siRNA, cosuppression molecule, or ribozyme molecule or a cosuppression nucleic acid molecule or a viral degradation nucleic acid molecule or a recombination nucleic acid molecule or an other polynucleotide capable to reduce or repress the expression of a gene product as shown in column 5 or 7 of table II, or in column 5 or 7, table I, or a homologue thereof.

[0844] This can be carried out in a manner known per se. For example, said nucleic acid construct of the invention, or said expression construct or said plasmid construct, which has been generated in accordance with what has been detailed above, can be transformed into competent agrobacteria by means of electroporation or heat shock. In principle, one must differentiate between the formation of cointegrated vectors on the one hand and the transformation with binary vectors on the other hand. In the case of the first alternative, the constructs, which comprise the codogenic gene segment or the nucleic acid molecule for the use according to the process of the invention have no T-DNA sequences, but the formation of the cointegrated vectors or constructs takes place in the agrobacteria by homologous recombination of the construct with T-DNA. The T-DNA is present in the agrobacteria in the form of Ti or Ri plasmids in which exogenous DNA has expediently replaced the oncogenes. If binary vectors are used, they can be transferred to agrobacteria either by bacterial conjugation or by direct transfer. These agrobacteria expediently already comprise the vector bearing the vir genes (currently referred to as helper Ti(Ri) plasmid).

[0845] In addition the stable transformation of plastids might be of advantageous in some cases because plastids are inherited maternally in most crops reducing or eliminating the risk of transgene flow through pollen. The process of the transformation of the chloroplast genome is generally achieved by a process which has been schematically displayed in Klaus et al., Nature Biotechnology 22 (2), 225 (2004). Plastidal transformation might especially advantageously for the repression of plastidal encoded nucleic acids of the invention.

[0846] Briefly the sequences to be transformed are cloned together with a selectable marker gene between flanking sequences homologous to the chloroplast genome. These homologous flanking sequences direct site specific intergration into the plastome. Plastidal transformation has been described for many different plant species and an overview can be taken from Bock et al. (2001) Transgenic plastids in basic research and plant biotechnology. J. Mol. Biol. 312 (3), 425 (2001), or Maliga, P , Trends Biotechnol. 21, 20 (2003). Further biotechnological progress has recently been reported in form of marker free plastid transformants, which can be produced by a transient cointegrated maker gene, Klaus et al., Nature Biotechnology 22 (2), 225 (2004).

[0847] One or more markers may expediently also be used together with the nucleic acid construct, or the vector and, if plants or plant cells shall be transformed together with the T-DNA, with the aid of which the isolation or selection of transformed organisms, such as agrobacteria or transformed plant cells, is possible. These marker genes enable the identification of a successful transfer of the nucleic acid molecules according to the invention via a series of different principles, for example via visual identification with the aid of fluorescence, luminescence or in the wavelength range of light which is discernible for the human eye, by a resistance to herbicides or antibiotics, via what are known as nutritive markers (auxotrophism markers) or antinutritive markers, via enzyme assays or via phytohormones. Examples of such markers which may be mentioned are GFP (=green fluorescent protein); the luciferin/luceferase system, the β-galactosidase with its colored substrates, for example X-Gal, the herbicide resistances to, for example, imidazolinone, glyphosate, phosphinothricin or sulfonylurea, the antibiotic resistances to, for example, bleomycin, hygromycin, streptomycin, kanamycin, tetracyclin, chloramphenicol, ampicillin, gentamycin, geneticin (G418), spectinomycin or blasticidin, to mention only a few, nutritive markers such as the utilization of mannose or xylose, or antinutritive markers such as the resistance to 2-deoxyglucose or D-amino acids (Erikson et al., Nature Biotech 22 (4), 455 (2004). This list is a small number of possible markers. The skilled worker is very familiar with such markers. Different markers are preferred, depending on the organism and the selection method.

[0848] As a rule, it is desired that the plant nucleic acid constructs are flanked by T-DNA at one or both sides of the gene segment. This is particularly useful when bacteria of the species Agrobacterium tumefaciens or Agrobacterium rhizogenes are used for the transformation. A method, which is preferred in accordance with the invention, is the trans-formation with the aid of Agrobacterium tumefaciens. However, biolistic methods may also be used advantageously for introducing the sequences in the process according to the invention, and the introduction by means of PEG is also possible. The transformed agrobacteria can be grown in the manner known per se and are thus available for the expedient transformation of the plants. The plants or plant parts to be transformed are grown or provided in the customary manner. The transformed agrobacteria are subsequently allowed to act on the plants or plant parts until a sufficient transformation rate is reached. Allowing the agrobacteria to act on the plants or plant parts can take different forms. For example, a culture of morphogenic plant cells or tissue may be used. After the T-DNA transfer, the bacteria are, as a rule, eliminated by antibiotics, and the regeneration of plant tissue is induced. This is done in particular using suitable plant hormones in order to initially induce callus formation and then to promote shoot development.

[0849] The transfer of foreign genes into the genome of a plant is called transformation. In doing this the methods described for the transformation and regeneration of plants from plant tissues or plant cells are utilized for transient or stable transformation. An advantageous transformation method is the transformation in planta. To this end, it is possible, for example, to allow the agrobacteria to act on plant seeds or to inoculate the plant meristem with agrobacteria. It has proved particularly expedient in accordance with the invention to allow a suspension of transformed agrobacteria to act on the intact plant or at least the flower primordia. The plant is subsequently grown on until the seeds of the treated plant are obtained (Clough and Bent, Plant J. 16, 735 (1998)). To select transformed plants, the plant material obtained in the transformation is, as a rule, subjected to selective conditions so that transformed plants can be distinguished from untransformed plants. For example, the seeds obtained in the above-described manner can be planted and, after an initial growing period, subjected to a suitable selection by spraying. A further possibility consists in growing the seeds, if appropriate after sterilization, on agar plates using a suitable selection agent so that only the transformed seeds can grow into plants. Further advantageous trans-formation methods, in particular for plants, are known to the skilled worker and are described hereinbelow.

[0850] Further advantageous suitable methods are protoplast transformation by poly(ethylene glycol)-induced DNA uptake, the “biolistic” method using the gene cannon—referred to as the particle bombardment method, electroporation, the incubation of dry embryos in DNA solution, microinjection and gene transfer mediated by Agrobacterium. Said methods are described by way of example in Jenes B. et al., Techniques for Gene Transfer, in: Transgenic Plants, Vol. 1, Engineering and Utilization, eds. Kung S. D. and Wu R., Academic Press (1993) 128-143 and in Potrykus, Annu. Rev. Plant Physiol. Plant Molec. Biol. 42, 205 (1991)). The nucleic acids or the construct to be expressed is preferably cloned into a vector, which is suitable for transforming Agrobacterium tumefaciens, for example pBin19 (Bevan et al., Nucl. Acids Res. 12, 8711 (1984)). Agrobacteria transformed by such a vector can then be used in known manner for the transformation of plants, in particular of crop plants such as by way of example tobacco plants, for example by bathing bruised leaves or chopped leaves in an agrobacterial solution and then culturing them in suitable media. The transformation of plants by means of Agrobacterium tumefaciens is described, for example, by Höfgen and Willmitzer in Nucl. Acid Res. 16, 9877 (1988) or is known inter alia from White F. F., Vectors for Gene Transfer in Higher Plants; in Transgenic Plants, Vol. 1, Engineering and Utilization, eds. Kung S. D. and Wu R., Academic Press, 1993, pp. 15-38.

[0851] The abovementioned nucleic acid molecules can be cloned into the nucleic acid constructs or vectors according to the invention in combination together with further genes, or else different genes are introduced by transforming several nucleic acid constructs or vectors (including plasmids) into a host cell, advantageously into a plant cell.

[0852] In one embodiment, in the process according to the invention, the nucleic acid sequences used in the process according to the invention can be advantageously linked operably to one or more regulatory signals in order to increase gene expression for example if an antisense, RNAi, snRNA, dsRNA, siRNA, miRNA, ta-siRNA, cosuppression molecule, or ribozyme molecule of the invention or the cosuppression nucleic acid molecule or the viral degradation nucleic acid molecule of the invention or encoding a DNA-, RNA- or protein-binding factor against genes, RNA's or proteins, a dominant negative mutant, or an antibody of the invention.

[0853] These regulatory sequences are intended to enable the specific expression of nucleic acid molecules, e.g. the genes or gene fragments or of the gene products or the nucleic acid used in the process of the invention. Depending on the host organism for example plant or microorganism, this may mean, for example, that the gene or gene fragment or inhibition constructs is expressed and/or overexpressed after induction only, or that it is expressed and/or overexpressed constitutive. These regulatory sequences are, for example, sequences to which the inductors or repressors bind and which thus regulate the expression of the nucleic acid.

[0854] Moreover, the gene construct can advantageously also comprise one or more of what are known as enhancer sequences in operable linkage with the promoter, and these enable an increased expression of the nucleic acid sequence. Also, it is possible to insert additional advantageous sequences at the 3′ end of the DNA sequences, such as, for example, further regulatory elements or terminators.

[0855] The nucleic acid molecules, which encode proteins according to the invention and nucleic acid molecules, which encode other polypeptides may be present in one nucleic acid construct or vector or in several ones. In one embodiment, only one copy of the nucleic acid molecule for use in the process of the invention or its encoding genes is present in the nucleic acid construct or vector. Several vectors or nucleic acid construct or vector can be expressed together in the host organism. The nucleic acid molecule or the nucleic acid construct or vector according to the invention can be inserted in a vector and be present in the cell in a free form. If a stable transformation is preferred, a vector is used, which is stably duplicated over several generations or which or a part of which is else be inserted into the genome. In the case of plants, integration into the plastid genome or, in particular, into the nuclear genome may have taken place. For the insertion of more than one constructs in the host genome the constructs to be expressed might be present together in one vector, for example in above-described vectors bearing a plurality of constructs.

[0856] As a rule, regulatory sequences for the expression rate of a constructs, for example a inhibition constructs like RNAi, miRNA, antisense, cosuppresion constructs are located upstream (5′), within, and/or downstream (3′) relative to the sequence of the nucleic acid molecule to be regulated. They control in particular transcription and/or translation and/or the transcript stability. The expression level is dependent on the conjunction of further cellular regulatory systems, such as the protein biosynthesis and degradation systems of the cell.

[0857] Regulatory sequences include transcription and translation regulating sequences or signals, e.g. sequences located upstream (5′), which concern in particular the regulation of transcription or translation initiation, such as promoters or start codons, and sequences located downstream (3′), which concern in particular the regulation of transcription or translation termination and transcript stability, such as polyadenylation signals or stop codons. Regulatory sequences can also be present in transcribed coding regions as well in transcribed non-coding regions, e.g. in introns, as for example splicing sites.

[0858] Promoters for the regulation of expression of the nucleic acid molecule according to the invention in a cell and which can be employed are, in principle, all those which are capable of reducing the transcription of the nucleic acid molecules if they replace an endogenous promoter or which can stimulate the transcription of inhibitory constructs for example an antisense, RNAi, snRNA, dsRNA, siRNA, miRNA, ta-siRNA, cosuppression molecule, or ribozyme molecule of the invention or the cosuppression nucleic acid molecule or the viral degradation nucleic acid molecule of the invention or constructs encoding a DNA-, RNA- or protein-binding factor against genes, RNA's or proteins, a dominant negative mutant, or an antibody of the invention. Suitable promoters, which are functional in these organisms, are generally known. They may take the form of constitutive or inducible promoters. Suitable promoters can enable the development- and/or tissue-specific expression in multi-celled eukaryotes; thus, leaf-, root-, flower-, seed-, stomata-, tuber- or fruit-specific promoters may advantageously be used in plants.

[0859] In principle, it is possible to use natural promoters together with their regulatory sequences, such as those mentioned above, for the novel process. It is also possible advantageously to use synthetic promoters, either additionally or alone, in particular when they mediate seed-specific expression such as described in, for example, WO 99/16890.

[0860] The expression of the nucleic acid molecules used in the process may be desired alone or in combination with other genes or nucleic acids. Multiple nucleic acid molecules conferring repression or expression of advantageous further genes, depending on the goal to be reached, can be introduced via the simultaneous transformation of several individual suitable nucleic acid constructs, i.e. expression constructs, or, preferably, by combining several expression cassettes on one construct. It is also possible to transform several vectors with in each case several expression cassettes stepwise into the recipient organism.

[0861] As described above, the transcription of the genes, which are in addition to the introduced nucleic acid molecules to be expressed or the genes introduced can advantageously be terminated by suitable terminators at the 3′ end of the biosynthesis genes introduced (behind the stop codon). Terminator, which may be used for this purpose are, for example, the OCS1 terminator, the nos3 terminator or the 35S terminator. As is the case with the promoters, different terminator sequences can be used for each gene. Terminators, which are useful in microorganism, are for example the fimA terminator, the txn terminator or the trp terminator. Such terminators can be rho-dependent or rho-independent.

[0862] Different plant promoters such as, for example, the USP, the LegB4-, the DC3 promoter or the ubiquitin promoter from parsley or other herein mentioned promoter and different terminators may advantageously be used in the nucleic acid construct useful for the reduction of the nucleic acid molecule shown in column 5 or 7 of Table I or its homologues mentioned herein. Further useful plant promoters are for example the maize ubiquitin promoter, the ScBV (Sugarcaine bacilliform virus) promoter, the Ipt2 or Ipt1-gene promoters from barley (WO 95/15389 and WO 95/23230) or those described in WO 99/16890 (promoters from the barley hordein-gene, the rice glutelin gene, the rice oryzin gene, the rice prolamin gene, the wheat gliadin gene, wheat glutelin gene, the maize zein gene, the oat glutelin gene, the Sorghum kasirin-gene, the rye secalin gene).

[0863] In order to ensure the stable integration, into the transgenic plant, of nucleic acid molecules used in the process according to the invention in combination with further biosynthesis genes over a plurality of generations, each of the coding regions used in the process can be expressed under the control of its own, preferably unique, promoter.

[0864] The nucleic acid construct is advantageously constructed in such a way that a promoter is followed by a suitable cleavage site for insertion of the nucleic acid to be expressed, advantageously in a polylinker, followed, if appropriate, by a terminator located behind the polylinker. If appropriate, this order is repeated several times so that several genes are combined in one construct and thus can be introduced into the transgenic plant in order to be expressed. The sequence is a for example repeated up to three times. For the expression, the nucleic acid sequences are inserted via the suitable cleavage site, for example in the polylinker behind the promoter. It is advantageous for each nucleic acid sequence to have its own promoter and, if appropriate, its own terminator, as mentioned above. However, it is also possible to insert several nucleic acid sequences behind a promoter and, if appropriate, before a terminator, in particular, if a polycistronic transcription is possible in the host or target cells. In this context, the insertion site, or the sequence of the nucleic acid molecules inserted, in the nucleic acid construct is not decisive, that is to say a nucleic acid molecule can be inserted in the first or last position in the cassette without this having a substantial effect on the expression. However, it is also possible to use only one promoter type in the construct.

[0865] Accordingly, in a preferred embodiment, the nucleic acid construct according to the invention confers the reduction or repression of a nucleic acid molecule comprising the polynucleotide as depicted in column 5 or 7 of table I, application no. 1, or an encoded gene product, e.g. a polypeptide as depicted in column 5 or 7 of table II, application no. 1, or encompassing a consensus sequence or a polypeptide motif as depicted in column 7 of table IV, application no. 1, or a homologue thereof described herein and, optionally further genes, in a plant and comprises one or more plant regulatory elements. Said nucleic acid construct according to the invention advantageously encompasses a plant promoter or a plant terminator or a plant promoter and a plant terminator. It further encodes for example isolated nucleic acid molecule of the invention encoding an antisense, RNAi, snRNA, dsRNA, siRNA, miRNA, ta-siRNA, or ribozyme molecule of the invention or the cosuppression nucleic acid molecule or the viral degradation nucleic acid molecule of the invention or encoding a DNA-, RNA- or protein-binding factor against genes, RNA's or proteins, a dominant negative mutant, or an antibody of the invention or the nucleic acid molecule for a recombination of the invention.

[0866] A “plant” promoter comprises regulatory elements, which mediate the expression of a coding sequence segment in plant cells. Accordingly, a plant promoter need not be of plant origin, but may originate from viruses or microorganisms, in particular for example from viruses which attack plant cells.

[0867] The plant promoter can also originate from a plant cell, e.g. from the plant, which is transformed with the nucleic acid construct or vector as described herein. This also applies to other “plant” regulatory signals, for example in “plant” terminators.

[0868] A nucleic acid construct suitable for plant expression preferably comprises regulatory elements which are capable of controlling the expression of genes in plant cells and which are operably linked so that each sequence can fulfill its function. Accordingly, the nucleic acid construct can also comprise transcription terminators. Examples for transcriptional termination are polyadenylation signals. Preferred polyadenylation signals are those which originate from Agrobacterium tumefaciens T-DNA, such as the gene 3 of the Ti plasmid pTiACH5, which is known as octopine synthase (Gielen et al., EMBO J. 3, 835 (1984) et seq.) or functional equivalents thereof, but all the other terminators which are functionally active in plants are also suitable.

[0869] In case a nucleic acid construct suitable for plant expression is used for the expression of a polypeptide preferably it also comprises other operably linked regulatory elements such as translation enhancers, for example the overdrive sequence, which comprises the tobacco mosaic virus 5′-untranslated leader sequence, which increases the protein/RNA ratio (Gallie et al., Nucl. Acids Research 15, 8693 (1987).

[0870] For expression in plants, the nucleic acid molecule must, as described above, be linked operably to or comprise a suitable promotor which expresses for example the antisense, RNAi, snRNA, dsRNA, siRNA, miRNA, ta-siRNA, cosuppression molecule, or ribozyme molecule of the invention or the cosuppression nucleic acid molecule or the viral degradation nucleic acid molecule of the invention or encoding a DNA-, RNA- or protein-binding factor against genes, RNA's or proteins, a dominant negative mutant, or an antibody of the invention at the right point in time and in a cell- or tissue-specific manner. Usable promoters are constitutive promoters (Benfey et al., EMBO J. 8, 2195 (1989)), such as those which originate from plant viruses, such as 35S CAMV (Franck et al., Cell 21, 285 (1980)), 19S CaMV (see also U.S. Pat. No. 5,352,605 and WO 84/02913), 34S FMV (Sanger et al., Plant. Mol. Biol., 14, 433 (1990)), the parsley ubiquitin promoter, or plant promoters such as the Rubisco small subunit promoter described in U.S. Pat. No. 4,962,028 or the plant promoters PRP1 (Ward et al., Plant. Mol. Biol. 22, 361 (1993)), SSU, PGEL1, OCS [Leisner, Proc Natl Acad Sci USA 85 (5), 2553 (1988)), lib4, usp, mas [Comai, Plant Mol Biol 15 (3), 373 (1990)), STLS1, ScBV (Schenk, Plant Mol Biol 39 (6), 1221 (1999)), B33, SAD1 or SAD2 (flax promoters, Jain et al., Crop Science, 39 (6), 1696 (1999)) or nos [Shaw et al., Nucleic Acids Res. 12 (20), 7831 (1984)). Stable, constitutive expression of the antisense, RNAi, snRNA, dsRNA, siRNA, miRNA, ta-siRNA, cosuppression molecule, or the ribozyme molecule of the invention or the cosuppression nucleic acid molecule or the viral degradation nucleic acid molecule of the invention or encoding a DNA-, RNA- or protein-binding factor against genes, RNA's or proteins, a dominant negative mutant, or an antibody of the invention can be advantageous. However, inducible expression of the nucleic acid molecule for the reduction of a nucleic acid molecule usuable for the process of the invention is advantageous, if a late expression before the harvest is of advantage, as metabolic manipulation may lead to plant growth retardation.

[0871] The expression of the nucleic acid molecule for the reduction of a nucleic acid molecule usuable for the process of the invention is can also be facilitated as described above via a chemical inducible promoter (for a review, see Gatz, Annu. Rev. Plant Physiol. Plant Mol. Biol., 48, 89 (1997)). Chemically inducible promoters are particularly suitable when it is desired to express the gene in a time-specific manner. Examples of such promoters are a salicylic acid inducible promoter (WO 95/19443), and abscisic acid-inducible promoter (EP 335 528), a tetracyclin-inducible promoter (Gatz et al. Plant J. 2, 397 (1992)), a cyclohexanol- or ethanol-inducible promoter (WO 93/21334) or others as described herein.

[0872] Other suitable promoters are those which react to biotic or abiotic stress conditions, for example the pathogen-induced PRP1 gene promoter (Ward et al., Plant. Mol. Biol. 22, 361 (1993)), the tomato heat-inducible hsp80 promoter (U.S. Pat. No. 5,187,267), the potato chill-inducible alpha-amylase promoter (WO 96/12814) or the wound-inducible pinII promoter (EP-A-0 375 091) or others as described herein.

[0873] Preferred promoters are in particular those which bring about gene expression in tissues and organs, in seed cells, such as endosperm cells and cells of the developing embryo.

[0874] Suitable promoters are the oilseed rape napin gene promoter (U.S. Pat. No. 5,608,152), the Vicia faba USP promoter (Baeumlein et al., Mol Gen Genet, 225 (3), 459 (1991)), the Arabidopsis oleosin promoter (WO 98/45461), the Phaseolus vulgaris phaseolin promoter (U.S. Pat. No. 5,504,200), the Brassica Bce4 promoter (WO 91/13980), the bean arc5 promoter, the carrot DcG3 promoter, or the Legumin B4 promoter (LeB4; Baeumlein et al., Plant Journal, 2 (2), 233 (1992)), and promoters which bring about the seed-specific expression in monocotyledonous plants such as maize, barley, wheat, rye, rice and the like. Advantageous seed-specific promoters are the sucrose binding protein promoter (WO 00/26388), the phaseolin promoter and the napin promoter. Suitable promoters which must be considered are the barley Ipt2 or Ipt1 gene promoter (WO 95/15389 and WO 95/23230), and the promoters described in WO 99/16890 (promoters from the barley hordein gene, the rice glutelin gene, the rice oryzin gene, the rice prolamin gene, the wheat gliadin gene, the wheat glutelin gene, the maize zein gene, the oat glutelin gene, the sorghum kasirin gene and the rye secalin gene). Further suitable promoters are Amy32b, Amy 6-6 and Aleurain (U.S. Pat. No. 5,677,474], Bce4 (oilseed rape) (U.S. Pat. No. 5,530,149], glycinin (soya) (EP 571 741], phosphoenolpyruvate carboxylase (soya) (JP 06/62870], ADR12-2 (soya) (WO 98/08962], isocitrate lyase (oilseed rape) (U.S. Pat. No. 5,689,040] or alphaamylase (barley) (EP 781 849]. Other promoters which are available for the expression of genes, e.g. of the nucleic acid molecule used in the process of the invention, in particular for the reduction of a nucleic acid molecule which activity is reduces in the process of the invention is in plants are leaf-specific promoters such as those described in DE-A 19644478 or light-regulated promoters such as, for example, the pea petE promoter.

[0875] Further suitable plant promoters are the cytosolic FBPase promoter or the potato ST-LSI promoter (Stockhaus et al., EMBO J. 8, 2445 (1989)), the Glycine max phosphoribosylpyrophosphate amidotransferase promoter (GenBank Accession No. U87999) or the node-specific promoter described in EP-A-0 249 676.

[0876] Other promoters, which are suitable in specific cases are those which bring about plastid-specific expression. Suitable promoters such as the viral RNA polymerase promoter are described in WO 95/16783 and WO 97/06250, and the Arabidopsis clpP promoter, which is described in WO 99/46394.

[0877] Other promoters, which are used for the strong expression of heterologous sequences, e.g. the nucleic acid molecule used in the process of the invention, in particular for the reduction of a nucleic acid molecule which activity is reduced in the process of the invention is in as many tissues as possible, in particular also in leaves, are, in addition to several of the abovementioned viral and bacterial promoters, preferably, plant promoters of actin or ubiquitin genes such as, for example, the rice actin1 promoter. Further examples of constitutive plant promoters are the sugarbeet

[0878] V-ATPase promoters (WO 01/14572). Examples of synthetic constitutive promoters are the Super promoter (WO 95/14098) and promoters derived from G-boxes (WO 94/12015). If appropriate, chemical inducible promoters may furthermore also be used, compare EPA 388186, EP-A 335528, WO 97/06268.

[0879] Another embodiment of the invention is a nucleic acid construct conferring the expression of for example the antisense, RNAi, snRNA, dsRNA, siRNA, miRNA, ta-siRNA, cosuppression molecule, or ribozyme molecule of the invention or the cosuppression nucleic acid molecule or the viral degradation nucleic acid molecule of the invention or encoding a DNA-, RNA- or protein-binding factor against genes, RNA's or proteins, a dominant negative mutant, or an antibody of the invention as used in the inventive process, suitable for the expression in plant.

[0880] Preferred recipient plants are, as described above, in particular those plants, which can be transformed in a suitable manner. These include monocotyledonous and dicotyledonous plants. Plants which must be mentioned in particular are agriculturally useful plants such as cereals and grasses, for example Triticum spp., Zea mays, Hordeum vulgare, oats, Secale cereale, Oryza sativa, Pennisetum glaucum, Sorghum bicolor, Triticale, Agrostis spp., Cenchrus ciliaris, Dactylis glomerata, Festuca arundinacea, Lolium spp., Medicago spp. and Saccharum spp., legumes and oil crops, for example Brassica juncea, Brassica napus, Glycine max, Arachis hypogaea, Gossypium hirsutum, Cicer arietinum, Helianthus annuus, Lens culinaris, Linum usitatissimum, Sinapis alba, Trifolium repens and Vicia narbonensis, vegetables and fruits, for example bananas, grapes, Lycopersicon esculentum, asparagus, cabbage, watermelons, kiwi fruit, Solanum tuberosum, Beta vulgaris, cassaya and chicory, trees, for example Coffea species, Citrus spp., Eucalyptus spp., Picea spp., Pinus spp. and Populus spp., medicinal plants and trees, and flowers.

[0881] One embodiment of the present invention also relates to a method for generating a vector, which comprises the insertion, into a vector, of the nucleic acid molecule characterized herein, the nucleic acid molecule according to the invention or the expression cassette according to the invention. The vector can, for example, be introduced into a cell, e.g. a microorganism or a plant cell, as described herein for the nucleic acid construct, or below under transformation or transfection or shown in the examples. A transient or stable transformation of the host or target cell is possible, however, a stable transformation is preferred.

[0882] The vector according to the invention is preferably a vector, which is suitable for reducing, repressing, decreasing or deleting of the polypeptide according to the invention in a plant. The method can thus also encompass one or more steps for integrating regulatory signals into the vector, in particular signals, which mediate the reduction, decrease or deletion in an plant.

[0883] Accordingly, the present invention also relates to a vector comprising the nucleic acid molecule characterized herein as part of a nucleic acid construct suitable for plant expression or the nucleic acid molecule according to the invention.

[0884] A advantageous vector used in the process of the invention, e.g. the vector of the invention, comprises a nucleic acid molecule which encodes a nucleic acid molecule which is used in the process of the invention, or a nucleic acid construct suitable for the expression in plant comprising the nucleic acid molecules usable in the process of the invention as described above.

[0885] Accordingly, the recombinant expression vectors which are advantageously used in the process of the invention comprise the nucleic acid molecules used in the process according to the invention or the nucleic acid construct according to the invention in a form which is suitable for repressing the activity of a nucleic acid molecule comprising a polynucleotide as depicted in column 5 or 7 of table I, application no. 1, or of a polypeptide as depicted in column 5 or 7 of table II, application no. 1, or a homologue thereof and/or in the same time expressing, in a host cell, additional genes, which are accompanied by the nucleic acid molecules according to the invention or described herein. Accordingly, the recombinant expression vectors comprise one or more regulatory signals selected on the basis of the host cells to be used for the expression, in operable linkage with the nucleic acid sequence to be expressed.

[0886] In accordance with the invention, the term “vector” refers to a nucleic acid molecule, which is capable of transporting another nucleic acid to which it is linked. One type of vector is a “plasmid”, which means a circular double-stranded DNA loop into which additional DNA segments can be ligated. A further type of vector is a viral vector, it being possible to ligate additional DNA segments into the viral genome. Certain vectors are capable of autonomous replication in a host cell into which they have been introduced (for example bacterial vectors with bacterial replication origin). Other preferred vectors are advantageously completely or partly integrated into the genome of a host cell when they are introduced into the host cell and thus replicate together with the host genome. Moreover, certain vectors are capable of controlling the expression of genes with which they are in operable linkage. In the present context, these vectors are referred to as “expression vectors”. As mentioned above, they are capable of autonomous replication or may be integrated partly or completely into the host genome. Expression vectors, which are suitable for DNA recombination techniques usually, take the form of plasmids. In the present description, “plasmid” and “vector” can be used interchangeably since the plasmid is the most frequently used form of a vector. However, the invention is also intended to encompass these other forms of expression vectors, such as viral vectors, which exert similar functions. The term vector is furthermore also to encompass other vectors which are known to the skilled worker, such as phages, viruses such as SV40, CMV, TMV, transposons, IS elements, phasmids, phagemids, cosmids, and linear or circular DNA.

[0887] In a recombinant expression vector, “operable linkage” means that the nucleic acid molecule of interest is linked to the regulatory signals in such a way that expression of the genes is possible: they are linked to one another in such a way that the two sequences fulfill the predicted function assigned to the sequence (for example in an in-vitro transcription/translation system, or in a host cell if the vector is introduced into the host cell).

[0888] The term “regulatory sequence” is intended to comprise promoters, enhancers and other expression control elements (for example polyadenylation signals). These regulatory sequences are described, for example, in Goeddel: Gene Expression Technology: Methods in Enzymology 185, Academic Press, San Diego, Calif. (1990), or see: Gruber and Crosby, in: Methods in Plant Molecular Biology and Biotechnolgy, CRC Press, Boca Raton, Fla., Ed.: Glick and Thompson, chapter 7, 89-108, including the references cited therein. Regulatory sequences encompass those, which control the constitutive expression of a nucleotide sequence in many types of host cells and those which control the direct expression of the nucleotide sequence in specific host cells only, and under specific conditions. The skilled worker knows that the design of the expression vector may depend on factors such as the selection of the host cell to be transformed, the extent to which the protein amount is reduced, and the like. A preferred selection of regulatory sequences is described above, for example promoters, terminators, enhancers and the like. The term regulatory sequence is to be considered as being encompassed by the term regulatory signal. Several advantageous regulatory sequences, in particular promoters and terminators are described above. In general, the regulatory sequences described as advantageous for nucleic acid construct suitable for expression are also applicable for vectors.

[0889] The recombinant expression vectors used can be designed specifically for the expression, in prokaryotic and/or eukaryotic cells, of nucleic acid molecules used in the process. This is advantageous since intermediate steps of the vector construction are frequently carried out in microorganisms for the sake of simplicity. For example, the genes according to the invention and other genes can be expressed in bacterial cells, insect cells (using baculovirus expression vectors), yeast cells and other fungal cells (Romanos, Yeast 8, 423 (1992); van den Hondel, (1991), in: More Gene Manipulations in Fungi, J. W. Bennet & L. L. Lasure, Ed., pp. 396-428: Academic Press: San Diego; and van den Hondel, C. A. M. J. J. (1991), in: Applied Molecular Genetics of Fungi, Peberdy, J. F., et al., Ed., pp. 1-28, Cambridge University Press: Cambridge), algae (Falciatore et al., Marine Biotechnology. 1, (3), 239 (1999)) using vectors and following a transformation method as described in WO 98/01572, and preferably in cells of multi-celled plants [see Schmidt, R. and Willmitzer, L., Plant Cell Rep. 583 (1988); Plant Molecular Biology and Biotechnology, C Press, Boca Raton, Fla., chapter 6/7, pp. 71-119 (1993); White F. F., in: Transgenic Plants, Bd. 1, Engineering and Utilization, Ed.: Kung and Wu R., Academic Press (1993), 128-43; Potrykus, Annu. Rev. Plant Physiol. Plant Molec. Biol. 42, 205 (1991), (and references cited therein)). Suitable host cells are furthermore discussed in Goeddel, Gene Expression Technology: Methods in Enzymology 185, Academic Press, San Diego, Calif. (1990). As an alternative, the sequence of the recombinant expression vector can be transcribed and translated in vitro, for example using T7 promotor-regulatory sequences and T7 polymerase.

[0890] In most cases, polynucleotides, as RNA, or polypeptides, or proteins can be expressed in prokaryotes using vectors comprising constitutive or inducible promoters, which control the expression of fusion proteins or nonfusion proteins. Typical fusion expression vectors are, inter alia, pGEX (Pharmacia Biotech Inc; Smith D. B. and Johnson, K. S. Gene 67, 31 (1988)), pMAL (New England Biolabs, Beverly, Mass.) and pRIT5 (Pharmacia, Piscataway, N.J.), in which glutathione-5-transferase (GST), maltose-E-binding protein or protein A is fused with the recombinant target protein. Examples of suitable inducible non-fusion E. coli expression vectors are, inter alia, pTrc (Amann et al., Gene 69, 301 (1988)) and pET 11d (Studier et al., Gene Expression Technology: Methods in Enzymology 185, Academic Press, San Diego, Calif. (1990) 60-89). The target gene expression of the pTrc vector is based on the transcription of a hybrid trp-lac fusion promoter by the host RNA polymerase. The target gene expression from the pET 11d vector is based on the transcription of a T7-gn10-lac fusion promoter, which is mediated by a coexpressed viral RNA polymerase (T7 gn1). This viral polymerase is provided by the host strains BL21 (DE3) or HMS174 (DE3) by a resident “Symbol”-prophage, which harbors a T7 gn1 gene under the transcriptional control of the lacUV 5 promoter.

[0891] Other vectors which are suitable in prokaryotic organisms are known to the skilled worker; these vectors are for example in E. coli pLG338, pACYC184, the pBR series, such as pBR322, the pUC series such as pUC18 or pUC19, the M113 mp series, pKC30, pRep4, pHS1, pHS2, pPLc236, pMBL24, pLG200, pUR290, pIN-III113-B1, “Symbolgt11 or pBdCI, in Streptomyces pIJ101, pIJ364, pIJ702 or pIJ361, in Bacillus pUB110, pC194 or pBD214, in Corynebacterium pSA77 or pAJ667.

[0892] In a further embodiment, the expression vector is a yeast expression vector. Examples of vectors for expression in the yeasts S. cerevisiae encompass pYeDesaturasec1 (Baldari et al., Embo J. 6,229 (1987)), pMFa (Kurjan and Herskowitz, Cell 30, 933 (1982)), pJRY88 (Schultz et al., Gene 54, 113 (1987)) and pYES2 (Invitrogen Corporation, San Diego, Calif.). Vectors and methods for the construction of vectors which are suitable for use in other fungi, such as the filamentous fungi, encompass those which are described in detail in: van den Hondel, C. A. M. J. J. ((1991), J. F. Peberdy, Ed., pp. 1-28, Cambridge University Press: Cambridge; or in: More Gene Manipulations in Fungi; J. W. Bennet & L. L. Lasure, Ed., pp. 396-428: Academic Press: San Diego]. Examples of other suitable yeast vectors are 2“Symbol”M, pAG-1, YEp6, YEp13 or pEMBLYe23.

[0893] Further vectors, which may be mentioned by way of example, are pALS1, pIL2 or pBB116 in fungi or pLGV23, pGHIac+, pBIN19, pAK2004 or pDH51 in plants.

[0894] As an alternative, the nucleic acid sequences can be expressed in insect cells using baculovirus expression vectors. Baculovirus vectors which are available for expressing proteins in cultured insect cells (for example Sf9 cells) encompass the pAc series (Smith et al., Mol. Cell. Biol. 3, 2156 (1983)) and the pVL series (Lucklow and Summers, Virology 170, 31 (1989)).

[0895] The abovementioned vectors are only a small overview of potentially suitable vectors. Further plasmids are known to the skilled worker and are described, for example, in: Cloning Vectors (Ed. Pouwels, P. H., et al., Elsevier, Amsterdam-New York-Oxford, 1985, ISBN 0 444 904018). Further suitable expression systems for prokaryotic and eukaryotic cells, see the chapters 16 and 17 by Sambrook J., Fritsch E. F. and Maniatis T., Molecular Cloning: A Laboratory Manual, 2nd Edition, Cold Spring Harbor Laboratory, Cold Spring Harbor Laboratory Press, Cold Spring Harbor, N.Y., 1989.

[0896] Accordingly, one embodiment of the invention relates to a vector comprising a nucleic acid molecule for use in the process according to the invention or a nucleic acid construct for use in the process of the invention, e.g. the nucleic acid molecule or the nucleic acid construct of the invention encompassing an isolated nucleic acid molecule encoding an antisense, RNAi, snRNA, dsRNA, siRNA, miRNA, ta-siRNA, cosuppression molecule, or ribozyme molecule of the invention or the cosuppression nucleic acid molecule or the viral degradation nucleic acid molecule of the invention or encoding a DNA-, RNA- or protein-binding factor against genes, RNA's or proteins, a dominant negative mutant, or an antibody of the invention or the nucleic acid molecule for a recombination of the invention, in particular the nucleic acid molecule for a homologous recombination. Said vector is useful for the reduction, repression, decrease or deletion of the polypeptide according to the invention in an organism preferably in a plant. Advantageously said nucleic acid molecule is in an operable linkage with regulatory sequences for the expression in a prokaryotic or eukaryotic, or in a prokaryotic and a eukaryotic host. Furthermore vectors which are suitable for homologous recombination are also within the scope of the invention.

[0897] Accordingly, one embodiment of the invention relates to a host cell, which has been transformed stably or transiently with the vector usable in the process of the invention, in particular with the vector according to the invention or the nucleic acid molecule according to the invention or the nucleic acid construct according to the invention. Said host cell may be a microorganism, a non-human animal cell or a plant cell.

[0898] In one embodiment, the present invention relates to a polypeptide encoded by the nucleic acid molecule according to the present invention, e.g. encoded by a nucleic acid molecule as depicted in column 5 or 7 of table I B, application no. 1, this means for example the present invention also relates to a polypeptide as depicted in column 5 or 7 of table II B, application no. 1, preferably conferring an enhancement of yield, in particular a yield-related trait, e.g. nitrogen use efficiency and/or an increase in the biomass production as compared to a corresponding, e.g. non-transformed, wild type plant after decreasing or repressing the expression or activity. Advantageously, said polypeptide or a fragment thereof, in particular an epitope or a haptene, which are all comprised by the term “polypeptide of the invention” can be used to produce or generate an antibody against said polypeptide. Advantageously, the antibody inactivates or reduces the activity of a polypeptide, which activity is reduced in the process of the present invention.

[0899] The present invention also relates to a process for the production of a polypeptide according to the present invention, the polypeptide being expressed in a host cell according to the invention, preferably in a microorganism, non-human animal cell or a transgenic plant cell.

[0900] In one embodiment, the nucleic acid molecule used in the process for the production of the polypeptide is derived from said microorganism, preferably from said prokaryotic or protozoic cell with said eukaryotic organism as host cell. In another embodiment the polypeptide is produced in said plant cell or plant with a nucleic acid molecule derived from a prokaryote or a fungus or an alga or another microorganism but not from plant. In another embodiment the polypeptide is produced in said plant cell or plant with a nucleic acid molecule derived from a plant or algae.

[0901] The skilled worker knows that protein and DNA expressed in different organisms differ in many respects and properties, e.g. methylation, degradation and posttranslational modification as for example glucosylation, phosphorylation, acetylation, myristoylation, ADP-ribosylation, farnesylation, carboxylation, sulfation, ubiquination, etc. though having the same coding sequence. Preferably, the cellular expression control of the corresponding protein differs accordingly in the control mechanisms controlling the activity and expression of an endogenous protein or another eukaryotic protein. One major difference between proteins expressed in prokaryotic or eukaryotic organism is the amount of glycosylation. For example in E. coli there are no glycosylated proteins. Proteins expressed in yeasts have high mannose content in the glycosylated proteins, whereas in plants the glycosylation pattern is complex.

[0902] The polypeptide of the present invention is preferably produced by recombinant DNA techniques. For example, a nucleic acid molecule encoding the protein is cloned into a vector (as described above), the vector is introduced into a host cell (as described above) and said polypeptide is expressed in the host cell. Said polypeptide can then be isolated from the cells by an appropriate purification scheme using standard protein purification techniques. Alternative to recombinant expression, a polypeptide being encoded by a nucleic acid molecule comprising a nucleic acid molecule as depicted in column 5 or 7 of table I, application no. 1, or a homologue thereof, in particular a fragment or a peptide of the present invention can be synthesized chemically using standard peptide synthesis techniques. Moreover, native polypeptides having the same structure and preferably conferring the activity of the protein usable in the process of the invention can be isolated from cells (e.g. endothelial cells), for example using the antibody of the present invention as described below. The antibody can be produced by standard techniques utilizing the polypeptide usable in the process of the present invention or a fragment thereof, i.e., the polypeptide of this invention.

[0903] In one embodiment, the present invention relates to a polypeptide having the activity represented by a polypeptide comprising a polypeptide as depicted in column 5 or 7 of table II, application no. 1, or comprising a consensus sequence or a polypeptide motif as depicted in column 7 of table IV, application no. 1, in particular an activity selected from the group consisting of At1g74730-protein, At3g63270-protein, protein kinase, protein serine/threonine phosphatase, and/or SET domain-containing protein. Said polypeptide confers preferably the aforementioned activity, in particular, the polypeptide confers the enhancement of yield, in particular a yield-related trait, e.g. nitrogen use efficiency and/or of the biomass production as compared to a corresponding, e.g. non-transformed, wild type plant after decreasing or repressing the cellular activity, e.g. by decreasing the expression or the specific activity of the polypeptide. In one embodiment, the present invention relates to a polypeptide having the amino acid sequence encoded by a nucleic acid molecule of the invention or obtainable by a process for the production of a polypeptide of the invention.

[0904] In one embodiment, said polypeptide distinguishes over the sequence as depicted in column 5 or 7 of table II A or B, application no. 1, by one or more amino acid. In another embodiment, said polypeptide of the invention does not consist of the sequence as depicted in column 5 or 7 of table II A or B, application no. 1. In a further embodiment, said polypeptide of the present invention is less than 100%, 99.999%, 99.99%, 99.9% or 99% identical to column 5 or 7 of table II A or B, application no. 1.

[0905] Preferably, the sequence of the polypeptide of the invention distinguishes from the sequence as depicted in column 5 or 7 of table II A or B, application no. 1, by not more than 80% or 70% of the amino acids, preferably not more than 60% or 50%, more preferred not more than 40% or 30%, even more preferred not more than 20% or 10%. In one embodiment, the polypeptide distinguishes form the sequence as depicted in column 5 or 7 of table II A or B, application no. 1, by more than 5, 6, 7, 8 or 9 amino acids, preferably by more than 10, 15, 20, 25 or 30 amino acids, even more preferred are more than 40, 50, or 60 amino acids. In one embodiment, the polypeptide of the invention originates from a plant cell.

[0906] Preferably, the polypeptide is isolated. An “isolated” or “purified” protein or nucleic acid molecule or biologically active portion thereof is substantially free of cellular material when produced by recombinant DNA techniques, or chemical precursors or other chemicals when chemically synthesized.

[0907] The language “substantially free of cellular material” includes preparations of the polypeptide in which the protein is separated from cellular components of the cells in which it is naturally or recombinantly produced. In one embodiment, the language “substantially free of cellular material” includes preparations having less than about 30% (by dry weight) of “contaminating protein”, more preferably less than about 20% of “contaminating protein”, still more preferably less than about 10% of “contaminating protein”, and most preferably less than about 5% “contaminating protein”. The term “contaminating protein” relates to polypeptides, which are not polypeptides of the present invention. When the polypeptide of the present invention or biologically active portion thereof is recombinantly produced, it is also preferably substantially free of culture medium, i.e., culture medium represents less than about 20%, more preferably less than about 10%, and most preferably less than about 5% of the volume of the protein preparation. The language “substantially free of chemical precursors or other chemicals” includes preparations in which the polypeptide of the present invention is separated from chemical precursors or other chemicals, which are involved in the synthesis of the protein. The language “substantially free of chemical precursors or other chemicals” includes preparations having less than about 30% (by dry weight) of chemical precursors or other proteins or chemicals which are not identical to the protein, more preferably less than about 20% chemical precursors or other proteins or chemicals, still more preferably less than about 10% chemical precursors or other proteins or chemicals, and most preferably less than about 5% chemical precursors or other proteins or chemicals which are not identical to the protein of the invention. In preferred embodiments, isolated proteins or biologically active portions thereof lack contaminating proteins from the same organism from which the polypeptide of the present invention is derived. Typically, such proteins are produced by recombinant techniques.

[0908] A polypeptide of the invention comprises preferably an amino acid sequence which is sufficiently homologous to an amino acid sequence as depicted in column 5 or 7 of table II, application no. 1, or which comprises a consensus sequence or a polypeptide motif as depicted in column 7 of table IV, application no. 1, such that the protein or portion thereof maintains the ability to confer the activity of the present invention. Preferably, the polypeptide has an amino acid sequence identical as depicted in column 5 or 7 of table II, application no. 1.

[0909] Further, the polypeptide of the invention or the polypeptide which activity is to be reduced in the process of the invention can have an amino acid sequence which is encoded by a nucleotide sequence which hybridizes, preferably hybridizes under stringent conditions as described above, to a nucleotide sequence of the nucleic acid molecule of the present invention.

[0910] Accordingly, the polypeptide has an amino acid sequence which is encoded by a nucleotide sequence that is at least about 35%, 40%, 45%, 50%, 55%, 60%, 65% or 70%, preferably at least about 75%, 80%, 85% or 90%, and more preferably at least about 91%, 92%, 93%, 94% or 95%, and even more preferably at least about 96%, 97%, 98%, 99% or more homologous to one of the nucleic acid molecules as depicted in column 5 or 7 of table I, application no. 1. The preferred polypeptide possesses at least one of the activities according to the invention and described herein.

[0911] A preferred polypeptide complement the knock out, e.g. an inactivation or a reduction, repression or deletion of a polypeptide comprising a polypeptide as depicted in column 5 or 7 of table II, application no. 1, or comprising a consensus sequence or a polypeptide motif as depicted in column 7 of table IV, application no. 1, when appropriately expressed in the knock out mutant. Appropriately expressed means in this context, that the polypeptide is produced in a similar quality and quantity and in a same developmental phase, tissue and compartment as the polypeptide inactivated, deleted or reduced in the knock out mutant. A preferred polypeptide of the present invention includes an amino acid sequence encoded by a nucleotide sequence which hybridizes, preferably hybridizes under stringent conditions, to a nucleotide sequence of column 5 or 7 of table I, application no. 1, or which is homologous thereto, as defined above.

[0912] Accordingly the polypeptide which activity is to be reduced in the process of the present invention, e.g. the polypeptide of the present invention can vary from the amino acid sequence of a polypeptide as depicted in column 5 or 7 of table II, application no. 1, or comprising a consensus sequence or a polypeptide motif as depicted in column 7 of table IV, application no. 1, in amino acid sequence due to natural variation or mutagenesis, as described in detail herein. Accordingly, the polypeptide comprise an amino acid sequence which is at least about 35%, 40%, 45%, 50%, 55%, 60%, 65% or 70%, preferably at least about 75%, 80%, 85% or 90%, and more preferably at least about 91%, 92%, 93%, 94% or 95%, and most preferably at least about 96%, 97%, 98%, 99% or more homologous to an entire amino acid sequence of a polypeptide as depicted in column 5 or 7 of table II, application no. 1, or comprising a consensus sequence or a polypeptide motif as depicted in column 7 of table IV, application no. 1.

[0913] For the comparison of amino acid sequences the same algorithms as described above or nucleic acid sequences can be used. Results of high quality are reached by using the algorithm of Needleman and Wunsch or Smith and Waterman. Therefore programs based on said algorithms are preferred. Advantageously the comparisons of sequences can be done with the program PileUp (J. Mol. Evolution., 25, 351 (1987), Higgins et al., CABIOS 5, 151 (1989)) or preferably with the programs “Gap” and “Needle”, which are both based on the algorithms of Needleman and Wunsch (J. Mol. Biol. 48; 443 (1970)), and “BestFit”, which is based on the algorithm of Smith and Waterman (Adv. Appl. Math. 2; 482 (1981)). “Gap” and “BestFit” are part of the GCG software-package (Genetics Computer Group, 575 Science Drive, Madison, Wis., USA 53711 (1991); Altschul et al., (Nucleic Acids Res. 25, 3389 (1997)), “Needle” is part of the The European Molecular Biology Open Software Suite (EMBOSS) (Trends in Genetics 16 (6), 276 (2000)). Therefore preferably the calculations to determine the percentages of sequence homology are done with the programs “Gap” or “Needle” over the whole range of the sequences. The following standard adjustments for the comparison of amino acid sequences were used for “Needle”: Matrix: EBLOSUM62, Gap_penalty: 8.0, Extend_penalty: 2.0. The following standard adjustments for the comparison of amino acid sequences were used for “Gap”: gap weight: 8, length weight: 2, average match: 2.912, average mismatch: −2.003.

[0914] Biologically active portions of a polypeptide include peptides comprising amino acid sequences derived from the amino acid sequence of the polypeptide disclosed herein, e.g. they comprise the amino acid sequence as depicted in the column 5 or 7 of table II or the consensus sequence or the polypeptide motifs of column 7 of table IV or the amino acid sequence of a protein homologous thereto, which include fewer amino acids than a full length protein having the activity of said protein, e.g. as disclosed or a full length protein which is homologous to a protein having the activity of the protein as disclosed or of a polypeptide to be reduced in the process of the present invention as depicted herein, and the repression, reduction or decrease of which lead to an enhancement of yield, in particular a yield-related trait, e.g. nitrogen use efficiency and/or an increase of the biomass production as compared to a corresponding, e.g. non-transformed, wild type plant.

[0915] Typically, biologically (or immunologically) active portions i.e. peptides, e.g., peptides which are, for example, 5, 10, 15, 20, 30, 35, 36, 37, 38, 39, 40, 50, 100 or more amino acids in length comprise a domain or motif with at least one activity or epitope of the polypeptide of the present invention. Moreover, other biologically active portions, in which other regions of the polypeptide are deleted, can be prepared by recombinant techniques and evaluated for one or more of the activities described herein.

[0916] Any mutagenesis strategies for the polypeptide usable in the process of the invention, in particular, of a polypeptide of the present invention, which result in an increase or in a decrease in the activity disclosed herein are not meant to be limiting; variations on these strategies will be readily apparent to one skilled in the art. Using such strategies, and incorporating the mechanisms disclosed herein, the nucleic acid molecule and polypeptide disclosed herein may be utilized to generate plants or parts thereof, expressing mutated nucleic acid molecule and/or polypeptide molecules still usable in the process of the invention. This desired compound may be any natural product of plants, which includes the final products of biosynthesis pathways and intermediates of naturally-occurring metabolic pathways, as well as molecules which do not naturally occur in the metabolism of said cells, but which are produced by a said cells of the invention.

[0917] The invention also provides chimeric or fusion proteins.

[0918] As used herein, a “chimeric protein” or “fusion protein” comprises a polypeptide operatively linked to a polypeptide which does not confer above-mentioned activity, in particular, which does confer an enhancement of yield, in particular a yield-related trait, e.g. nitrogen use efficiency and/or an increase of biomass production as compared to a corresponding, e.g. non-transformed, wild type plant if its expression or activity is decreased.

[0919] In one embodiment, a protein (=“polypeptide”) is preferred which confers an enhancement of yield, in particular a yield-related trait, e.g. nitrogen use efficiency and/or an increase of the biomass production as compared to a corresponding, e.g. non-transformed, wild type plant, once its activity is decreased. Said protein refers preferably to a polypeptide having an amino acid sequence corresponding to the polypeptide as disclosed herein, preferably having an amino acid sequence corresponding to the polypeptides as depicted in column 5 or 7 of table II, application no. 1, or comprising a consensus sequence or a polypeptide motif as depicted in column 7 of table IV, application no. 1, or a homologue thereof.

[0920] Within the fusion protein, the term “operatively linked” is intended to indicate that a polypeptide as disclosed herein and an other polypeptide or part thereof are fused to each other so that both sequences fulfil the proposed function addicted to the sequence used. The other polypeptide can be fused to the N-terminus or C-terminus of e.g. a polypeptide which activity is to be reduced in the process of the invention. For example, in one embodiment the fusion protein is a GST fusion protein in which the sequences of the polypeptide are fused to the C-terminus of the GST sequences. Such fusion proteins can facilitate the purification of recombinant polypeptides of the invention.

[0921] Preferably, a chimeric or fusion protein of the invention is produced by standard recombinant DNA techniques. For example, DNA fragments coding for the different polypeptide sequences are ligated together in-frame in accordance with conventional techniques, for example by employing blunt-ended or stagger-ended termini for ligation, restriction enzyme digestion to provide for appropriate termini, filling-in of cohesive ends as appropriate, alkaline phosphatase treatment to avoid undesirable joining, and enzymatic ligation. The fusion gene can be synthesized by conventional techniques including automated DNA synthesizers. Alternatively, PCR amplification of gene fragments can be carried out using anchor primers, which give rise to complementary overhangs between two consecutive gene fragments which can subsequently be annealed and reamplified to generate a chimeric gene sequence (see, for example, Current Protocols in Molecular Biology, eds. Ausubel et al. John Wiley & Sons: 1992). Moreover, many expression vectors are commercially available that already encode a fusion moiety (e.g., a GST polypeptide). The nucleic acid molecule can be cloned into such an expression vector such that the fusion moiety is linked in-frame to the encoded protein.

[0922] Furthermore, folding simulations and computer redesign of structural motifs of a protein to be reduced or repressed according to the process of the invention, e.g. of a polypeptide as disclosed herein, can be performed using appropriate computer programs (Olszewski, Proteins 25, 286 (1996); Hoffman, Comput. Appl. Biosci. 11, 675 (1995)). Computer modeling of protein folding can be used for the conformational and energetic analysis of detailed peptide and protein models (Monge, J. Mol. Biol. 247, 995 (1995); Renouf, Adv. Exp. Med. Biol. 376, 37 (1995)). The appropriate programs can be used for the identification of interactive sites of a polypeptide and its substrates or binding factors or other interacting proteins by computer assistant searches for complementary peptide sequences (Fassina, Immunomethods 114 (1994)). Further appropriate computer systems for the design of protein and peptides are described in the prior art, for example in Berry, Biochem. Soc. Trans. 22, 1033 (1994); Wodak, Ann. N.Y. Acad. Sci. 501, 1 (1987); Pabo, Biochemistry 25, 5987 (1986). The results obtained from the above-described computer analysis can be used for, e.g., the preparation of peptidomimetics of a protein or fragments thereof. Such pseudopeptide analogues of the, natural amino acid sequence of the protein may very efficiently mimic the parent protein (Benkirane, J. Biol. Chem. 271, 33218 (1996)). For example, incorporation of easily available achiral Q-amino acid residues into a protein or a fragment thereof results in the substitution of amide bonds by polymethylene units of an aliphatic chain, thereby providing a convenient strategy for constructing a peptidomimetic (Banerjee, Biopolymers 39, 769 (1996)).

[0923] Superactive peptidomimetic analogues of small peptide hormones in other systems are described in the prior art (Zhang, Biochem. Biophys. Res. Commun. 224, 327 (1996)). Appropriate peptidomimetics of a polypeptide can also be identified by the synthesis of peptidomimetic combinatorial libraries through successive amide alkylation and testing the resulting compounds, e.g., for their binding and immunological properties. Methods for the generation and use of peptidomimetic combinatorial libraries are described in the prior art, for example in Ostresh, Methods in Enzymology 267, 220 (1996) and Dorner, Bioorg. Med. Chem. 4, 709 (1996).

[0924] Furthermore, a three-dimensional and/or crystallographic structure of the protein can be used for the design of peptidomimetic inhibitors of the activity of a protein comprising a polypeptide as depicted in column 5 or 7 of table II, application no. 1, or comprising a consensus sequence or a polypeptide motif as depicted in column 7 of table IV, application no. 1 (Rose, Biochemistry 35, 12933 (1996); Rutenber, Bioorg. Med. Chem. 4, 1545 (1996)).

[0925] Furthermore, a three-dimensional and/or crystallographic structure of a protein described herein and the identification of interactive sites and its substrates or binding factors can be used for design of mutants with modulated binding or turn over activities. For example, the active center of the polypeptide of the present invention can be modelled and amino acid residues participating in the catalytic reaction can be modulated to increase or decrease the binding of the substrate to inactivate the polypeptide. The identification of the active center and the amino acids involved in the catalytic reaction facilitates the screening for mutants having an increased or decreased activity.

[0926] One embodiment of the invention also relates to an antibody, which binds specifically to the polypeptide disclosed herein, i.e. specific fragments or epitopes of such a protein.

[0927] The term “epitope” relates to specific immunoreactive sites within an antigen, also known as antigenic determinates. These epitopes can be a linear array of monomers in a polymeric composition—such as amino acids in a protein—or consist of or comprise a more complex secondary or tertiary structure. Those of skill will recognize that immunogens (i.e., substances capable of eliciting an immune response) are antigens; however, some antigen, such as haptens, are not immunogens but may be made immunogenic by coupling to a carrier molecule. The term “antigen” includes references to a substance to which an antibody can be generated and/or to which the antibody is specifically immunoreactive.

[0928] The antibody preferably confers the reduction, repression or deletion of a protein comprising a polypeptide as depicted in column 5 or 7 of table II, application no. 1, preferably as depicted in table II B, application no. 1, or comprising a consensus sequence or a polypeptide motif as depicted in column 7 of table IV, application no. 1, or a homologue thereof as described herein, e.g. the antibody inactivates the protein of the invention due to its binding in the organism or a part thereof.

[0929] The antibodies of the invention can also be used to identify and isolate a target polypeptide which activity has to be reduces according to the invention. Such anti-bodies can also be expressed in the suitable host organisms thereby reducing the activity of a gene product disclosed herein, e.g. the polynucleotide or polypeptide disclosed herein, e.g. of a nucleic acid molecule comprising a nucleic acid molecule shown in column 5 or 7 of table I, application no. 1, e.g. the polypeptide comprising the polypeptide as depicted in column 5 or 7 of table II, application no. 1, by binding to the expression product leading for example to a steric interference with their activity.

[0930] These antibodies can be monoclonal antibodies, polyclonal antibodies or synthetic antibodies as well as fragments of antibodies, such as Fab, Fv or scFv fragments etc. Monoclonal antibodies can be prepared, for example, by the techniques as originally described in Köhler and Milstein, Nature 256, 495 (1975) and Galfr6, Meth. Enzymol. 73, 3 (1981) which comprise the fusion of mouse myeloma cells to spleen cells derived from immunized mammals.

[0931] Furthermore, antibodies or fragments thereof to the aforementioned peptides can be obtained by using methods, which are described, e.g. in Harlow and Lane “Antibodies, A Laboratory Manual”, CSH Press, Cold Spring Harbor, 1988. These antibodies can be used, for example, for the immunoprecipitation and immunolocalization of proteins according to the invention as well as for the monitoring of the synthesis of such proteins, for example, in recombinant organisms, and for the identification of compounds interacting with the protein according to the invention. For example, surface plasmon resonance as employed in the BIAcore system can be used to increase the efficiency of phage antibodies selections, yielding a high increment of affinity from a single library of phage antibodies, which bind to an epitope of the protein of the invention (Schier, Human Antibodies Hybridomas 7, 97 (1996); Malmborg, J. Immunol. Methods 183, 7 (1995)). In many cases, the binding phenomena of antibodies to antigens is equivalent to other ligand/anti-ligand binding.

[0932] A further embodiment of the invention also relates to a method for the generation of a transgenic plant cell or a transgenic plant tissue or a transgenic plant, which comprises introducing, into the plant, the plant cell or the plant tissue, the nucleic acid construct according to the invention, the vector according to the invention, or the nucleic acid molecule according to the invention.

[0933] A further embodiment of the invention also relates to a method for the transient generation of a transgenic plant cell or a transgenic plant tissue or a trans-genic plant, which comprises introducing, into the plant, the plant cell or the plant tissue, the nucleic acid construct according to the invention, the vector according to the invention, the nucleic acid molecule characterized herein as being contained in the nucleic acid construct of the invention or the nucleic acid molecule used in the process according to the invention, whereby the introduced nucleic acid molecules, nucleic acid construct and/or vector is not integrated into the genome of the host or host cell. Therefore the transformants are not stable during the propagation of the host in respect of the introduced nucleic acid molecules, nucleic acid construct and/or vector.

[0934] In the process according to the invention, transgenic organisms are also to be understood as meaning—if they take the form of plants—plant cells, plant tissues, plant organs such as root, shoot, stem, seed, flower, tuber or leaf, or intact plants which are grown.

[0935] “Growing” is to be understood as meaning for example culturing the trans-genic plant cells, plant tissue or plant organs on or in a nutrient medium or the intact plant on or in a substrate, for example in hydroponic culture, potting compost, on a field soil or on the respective N deficient analogs thereof.

[0936] In a further advantageous embodiment of the process, the nucleic acid molecules can be expressed in plant cells from higher plants (for example spermatophytes such as crops). Examples of plant expression vectors encompass those which are described in detail herein or in: Becker D. (Plant Mol. Biol. 20, 1195 (1992)) and Bevan M. W. (Nucl. Acids Res. 12, 8711 (1984); Vectors for Gene Transfer in Higher Plants; in: Trans-genic Plants, Vol. 1, Engineering and Utilization, Ed.: Kung and R. Wu, Academic Press, 1993, pp. 15-38). An overview of binary vectors and their use is also found in Hellens R. ((Trends in Plant Science 5 (10), 446 (2000)).

[0937] Vector DNA can be introduced into cells via conventional transformation or transfection techniques. The terms “transformation” and “transfection” include conjugation and transduction and, as used in the present context, are intended to encompass a multiplicity of prior-art methods for introducing foreign nucleic acid molecules (for example DNA) into a host cell, including calcium phosphate coprecipitation or calcium chloride coprecipitation, DEAE-dextran-mediated transfection, PEG-mediated transfection, lipofection, natural competence, chemically mediated transfer, electroporation or particle bombardment. Suitable methods for the transformation or transfection of host cells, including plant cells, can be found in Sambrook et al. (Molecular Cloning: A Laboratory Manual., 2^{nd} Ed., Cold Spring Harbor Laboratory, Cold Spring Harbor Laboratory Press, Cold Spring Harbor, N.Y., 1989) and in other laboratory handbooks such as Methods in Molecular Biology, 1995, Vol. 44, Agrobacterium protocols, Ed.: Gartland and Davey, Humana Press, Totowa, N.J.

[0938] The above-described methods for the transformation and regeneration of plants from plant tissues or plant cells are exploited for transient or stable transformation of plants. Suitable methods are the transformation of protoplasts by polyethylene-glycol-induced DNA uptake, the biolistic method with the gene gun—known as the particle bombardment method—, electroporation, the incubation of dry embryos in DNA-containing solution, microinjection and the Agrobacterium-mediated gene transfer. The above-mentioned methods are described for example in Jenes B., Techniques for Gene Transfer, in: Trans-genic Plants, Vol. 1, Engineering and Utilization, edited by Kung S. D. and Wu R., Academic Press (1993) 128-143 and in Potrykus, Annu. Rev. Plant Physiol. Plant Molec. Biol. 42, 205 (1991). The construct to be expressed is preferably cloned into a vector, which is suitable for transforming Agrobacterium tumefaciens, for example pBin19 (Bevan, Nucl. Acids Res. 12, 8711 (1984)). Agrobacteria transformed with such a vector can then be used in the known manner for the transformation of plants, in particular crop plants, such as, for example, tobacco plants, for example by bathing scarified leaves or leaf segments in an agrobacterial solution and subsequently culturing them in suitable media. The transformation of plants with Agrobacterium tumefaciens is described for example by Höfgen and Willmitzer in Nucl. Acid Res. 16, 9877 (1988) or known from, inter alia, White F. F., Vectors for Gene Transfer in Higher Plants; in Transgenic Plants, Vol. 1, Engineering and Utilization, edited by Kung S. D. and Wu R., Academic Press, 1993, pp. 15-38.

[0939] To select for the successful transfer of a nucleic acid molecule, vector or nucleic acid construct into a host organism, it is advantageous to use marker genes as have already been described above in detail. It is known of the stable or transient integration of nucleic acids into plant cells that only a minority of the cells takes up the foreign DNA and, if desired, integrates it into its genome, depending on the expression vector used and the transfection technique used. To identify and select these integrants, a gene encoding for a selectable marker (as described above, for example resistance to antibiotics) is usually introduced into the host cells together with the gene of interest. Preferred selectable markers in plants comprise those, which confer resistance to an herbicide such as glyphosate or gluphosinate. Other suitable markers are, for example, markers, which encode genes involved in biosynthetic pathways of, for example, sugars or amino acids, such as β-galactosidase, ura3 or ilv2. Markers, which encode genes such as luciferase, gfp or other fluorescence genes, are likewise suitable. These markers and the aforementioned markers can be used in mutants in whom these genes are not functional since, for example, they have been deleted by conventional methods. Furthermore, nucleic acid molecules, which encode a selectable marker, can be introduced into a host cell on the same vector as those, which encode the nucleotide acid molecule used in the process or else in a separate vector. Cells which have been transfected stably with the nucleic acid molecule introduced can be identified for example by selection (for example, cells which have integrated the selectable marker survive whereas the other cells die).

[0940] Since the marker genes, as a rule specifically the gene for resistance to antibiotics and herbicides, are no longer required or are undesired in the transgenic host cell once the nucleic acids have been introduced successfully, the process according to the invention for introducing the nucleic acids advantageously employs techniques which enable the removal, or excision, of these marker genes. One such a method is what is known as cotransformation. The cotransformation method employs two vectors simultaneously for the transformation, one vector bearing the nucleic acid or nucleic acid construct according to the invention and a second bearing the marker gene(s). A large proportion of transformants receives or, in the case of plants, comprises (up to 40% of the transformants and above), both vectors. The marker genes can subsequently be removed from the trans-formed plant by performing crosses. In an preferred embodiment, a conditional marker allowing both positive and negative selection is used, in order to first identify the transformation event by the positive selection and later on allowing for the identification of lines which have lost the marker through crossing or segregation by negative selection. Markers which confer resistance against D-amino acids are such preferred conditional markers (Erikson et al., Nature Biotech 22 (4), 455 (2004)). In another method, marker genes integrated into a transposon are used for the transformation together with desired nucleic acid (known as the Ac/Ds technology). In some cases (approx. 10%), the transposon jumps out of the genome of the host cell once transformation has taken place successfully and is lost. In a further number of cases, the transposon jumps to a different location. In these cases, the marker gene must be eliminated by performing crosses. In microbiology, techniques were developed which make possible, or facilitate, the detection of such events. A further advantageous method relies on what are known as recombination systems, whose advantage is that elimination by crossing can be dispensed with. The best-known system of this type is what is known as the Cre/lox system. Cre1 is a recombinase, which removes the sequences located between the loxP sequence. If the marker gene is integrated between the loxP sequence, it is removed, once transformation has taken place successfully, by expression of the recombinase. Further recombination systems are the HIN/HIX, FLP/FRT and REP/STB system (Tribble et al., J. Biol. Chem., 275, 22255 (2000); Velmurugan et al., J. Cell Biol., 149, 553 (2000)). A site-specific integration into the plant genome of the nucleic acid sequences according to the invention is possible. Naturally, these methods can also be applied to microorganisms such as yeast, fungi or bacteria.

[0941] Agrobacteria transformed with an expression vector according to the invention may also be used in the manner known per se for the transformation of plants such as experimental plants like Arabidopsis or crop plants, such as, for example, cereals, maize, oats, rye, barley, wheat, soya, rice, cotton, sugarbeet, canola, sunflower, flax, hemp, potato, tobacco, tomato, carrot, bell peppers, oilseed rape, tapioca, cassaya, arrow root, tagetes, alfalfa, lettuce and the various tree, nut, cotton and grapevine species, in particular oil-containing crop plants such as soya, peanut, castor-oil plant, sunflower, maize, cotton, flax, oilseed rape, coconut, oil palm, safflower (Carthamus tinctorius) or cocoa beans, for example by bathing scarified leaves or leaf segments in an agrobacterial solution and subsequently growing them in suitable media.

[0942] In addition to the transformation of somatic cells, which then has to be regenerated into intact plants, it is also possible to transform the cells of plant meristems and in particular those cells which develop into gametes. In this case, the transformed gametes follow the natural plant development, giving rise to transgenic plants. Thus, for example, seeds of Arabidopsis are treated with agrobacteria and seeds are obtained from the developing plants of which a certain proportion is transformed and thus transgenic (Feldman K. A. and Marks M. D., Mol Gen Genet. 208, 274 (1987); Feldmann K., in Koncz C., Chua N-H. and Shell J., eds, Methods in Arabidopsis Research. Word Scientific, Singapore, pp. 274-289 (1992).). Alternative methods are based on the repeated removal of the influorescences and incubation of the excision site in the center of the rosette with transformed agrobacteria, whereby transformed seeds can likewise be obtained at a later point in time (Chang, Plant J. 5, 551 (1994); Katavic, Mol Gen Genet. 245, 363 (1994)). However, an especially effective method is the vacuum infiltration method with its modifications such as the “floral dip” method. In the case of vacuum infiltration of Arabidopsis, intact plants under reduced pressure are treated with an agrobacterial suspension (Bechthold N., C R Acad Sci Paris Life Sci, 316 1194 (1993)), while in the case of the“floral dip” method the developing floral tissue is incubated briefly with a surfactant-treated agrobacterial suspension (Clough S. J., and Bent A. F. The Plant J. 16, 735 (1998)). A certain proportion of transgenic seeds are harvested in both cases, and these seeds can be distinguished from nontransgenic seeds by growing under the above-described selective conditions.

[0943] The genetically modified plant cells can be regenerated via all methods with which the skilled worker is familiar. Suitable methods can be found in the abovementioned publications by Kung S. D. and Wu R., Potrykus or Höfgen and Willmitzer.

[0944] Accordingly, the present invention thus also relates to a plant cell comprising the nucleic acid construct according to the invention, the nucleic acid molecule according to the invention or the vector according to the invention. Accordingly, the present invention thus also relates to a plant cell produced according to the abovementioned process to produce a plant cell.

[0945] Accordingly the present invention relates to any cell, in particular to a plant cell, plant tissue or plant or its progeny, which is transgenic for any nucleic acid molecule or construct disclosed herein, e.g. the nucleic acid molecule's repression or reduction or its gene product activity repression or reduction confers the increased yield, in particular an increased yield-related trait, e.g. an increased nutrient use efficiency, such as an enhanced nitrogen use efficiency and/or increased tolerance to environmental stress and/or increased biomass production as compared to a corresponding, e.g. non-transformed, wild type plant.

[0946] Accordingly the present invention relates to any cell transgenic for any nucleic acid molecule comprising the nucleic acid molecule or part of it, which activity is to be reduced or encoding the polypeptide which activity is to be reduced in the process of the invention, e.g. the nucleic acid molecule of the invention, the nucleic acid construct of the invention, the antisense molecule of the invention, the vector of the invention or a nucleic acid molecule encoding the polypeptide of the invention, e.g. encoding a polypeptide having activity of the protein of the invention.

[0947] Accordingly the present invention relates to any cell transgenic for the vector, the host cell, the polypeptide, or the antisense, RNAi, snRNA, dsRNA, siRNA, miRNA, ta-siRNA, cosuppression construct, recombination construct or ribozyme molecule, or the viral nucleic acid molecule, the antibody of the invention, e.g. for the vector, the host cell, the polypeptide, or the antisense, RNAi, snRNA, dsRNA, siRNA, miRNA, ta-siRNA, cosuppression construct, recombination construct or ribozyme molecule, or the viral nucleic acid molecule comprising a fragment of the nucleic acid molecule disclosed herein, the antibody binding to a epitope of the polypeptide disclosed herein.

[0948] A naturally occurring expression cassette—for example the naturally occurring combination of the promoter of the protein with the corresponding gene, which codes for the protein of interest—becomes a transgenic expression cassette when it is modified by non-natural, synthetic “artificial” methods such as, for example, mutagenization. Such methods have been described (U.S. Pat. No. 5,565,350; WO 00/15815; also see above).

[0949] Further, the plant cell, plant tissue or plant can also be transformed such that further enzymes and proteins are (over)expressed or repressed or reduced for supporting an increased yield, in particular an increased yield-related trait, e.g. an increased nutrient use efficiency, such as an enhanced nitrogen use efficiency and/or increased tolerance to environmental stress and/or increased biomass production as compared to a corresponding, e.g. non-transformed, wild type plant.

[0950] With regard to any nucleic acid sequence a nucleic acid construct which contains said nucleic acid sequence or an organism (=transgenic organism) which is trans-formed with said nucleic acid sequence or said nucleic acid construct, “transgene” means all those constructs which have been brought about by genetic manipulation methods and in which either
[0951] (a) said nucleic acid sequence or a derivative thereof, or
[0952] (b) a genetic regulatory element, for example a promoter, which is functionally linked to said nucleic acid sequence or a derivative thereof, or
[0953] (c) (a) and (b)
   is/are not present in its/their natural genetic environment or has/have been modified by means of genetic manipulation methods, it being possible for the modification to be, by way of example, a substitution, addition, deletion, inversion or insertion of one or more nucleotides or nucleotide radicals.

[0954] “Natural genetic environment” means the natural chromosomal locus in the organism of origin or the presence in a genomic library. In the case of a genomic library, the natural, genetic environment of the nucleic acid sequence is preferably at least partially still preserved. The environment flanks the nucleic acid sequence at least on one side and has a sequence length of at least 50 bp, preferably at least 500 bp, particularly preferably at least 1000 bp, very particularly preferably at least 5000 bp.

[0955] However, transgenic also means that the nucleic acids according to the invention are located at their natural position in the genome of an organism, but that the sequence has been modified in comparison with the natural sequence and/or that the regulatory sequences of the natural sequences have been modified. Preferably, transgenic/recombinant is to be understood as meaning the expression of the nucleic acids used in the process according to the invention in a non-natural position in the genome, that is to say the expression of the nucleic acids is homologous or, preferably, heterologous. This expression can be transiently or of a sequence integrated stably into the genome.

[0956] The use of the nucleic acid sequence described herein in the process of the invention or of the nucleic acid construct or another embodiment according to this invention for the generation of transgenic plants is therefore also subject matter of the invention.

[0957] The term “transgenic plants” used in accordance with the invention refers to the progeny of a transgenic plant, for example the T1, T2, T3 and subsequent plant generations or the BC1, BC2, BC3 and subsequent plant generations. Thus, the transgenic plants according to the invention can be raised and selfed or crossed with other individuals in order to obtain further transgenic plants according to the invention. Transgenic plants may also be obtained by propagating transgenic plant cells vegetatively. The present invention also relates to transgenic plant material, which can be derived from a transgenic plant population according to the invention. Such material includes plant cells and certain tissues, organs and parts of plants in all their manifestations, such as seeds, leaves, anthers, fibers, tubers, roots, root hairs, stems, embryo, calli, cotelydons, petioles, harvested material, plant tissue, reproductive tissue and cell cultures, which are derived from the actual transgenic plant and/or can be used for bringing about the transgenic plant.

[0958] Any transformed plant obtained according to the invention can be used in a conventional breeding scheme or in in vitro plant propagation to produce more transformed plants with the same characteristics and/or can be used to introduce the same characteristic in other varieties of the same or related species. Such plants are also part of the invention. Seeds obtained from the transformed plants genetically also contain the same characteristic and are part of the invention. As mentioned before, the present invention is in principle applicable to any plant and crop that can be transformed with any of the transformation method known to those skilled in the art. In a specific embodiment the nucleic acid or the polypeptide which activity is reduced according to the process of the invention is mutated or otherwise reduced in its activity in a transformable crop variety. The genes or mutated version of the nucleic acid or the polypeptide conferring the reduction are later on transferred to a elite (commercial relevant) crop variety by for example (marker assisted) crossing, whereby the mutated or otherwise reduced version of the nucleic acid or polypeptide of the invention replace or repress the original or native and active one.

[0959] In an especially preferred embodiment, the organism, the host cell, plant cell, plant or plant tissue according to the invention is transgenic.

[0960] Accordingly, the invention therefore relates to transgenic organisms trans-formed with at least one nucleic acid molecule disclosed herein, e.g. the antisense, RNAi, snRNA, dsRNA, siRNA, miRNA, ta-siRNA, cosuppression construct, recombination construct or ribozyme molecule, or the viral nucleic acid molecule, nucleic acid construct or vector according to the invention, and to cells, cell cultures, tissues, parts—such as, for example, in the case of plant organisms, plant tissue, for example leaves, roots and the like—or propagation material derived from such organisms, or intact plants.

[0961] Accordingly, the present invention also relates to cells, cell cultures, tissues, parts—such as, for example, in the case of plant organisms, plant tissue, for example leaves, roots and the like—or propagation material derived from such organisms, or intact plants with an increased yield, in particular an increased yield-related trait, e.g. an increased nutrient use efficiency, such as an enhanced nitrogen use efficiency and/or increased tolerance to environmental stress and/or increased biomass production as compared to a corresponding, e.g. non-transformed, wild type plant.

[0962] In particular the present invention also relates to cells, cell cultures, tissues, parts—such as, for example, in the case of plant organisms, plant tissue, for example leaves, roots and the like—or propagation material derived from such organisms, or intact plants which have reduced or deleted activity selected from the group consisting of: At1g74730-protein, At3g63270-protein, protein kinase, protein serine/threonine phosphatase, and/or SET domain-containing protein.

[0963] Further, the present invention also relates to cells, cell cultures, tissues, parts—such as, for example, in the case of plant organisms, plant tissue, for example leaves, roots and the like—or propagation material derived from such organisms, or intact plants comprising a reduced activity or expression of a nucleic acid molecule or polypeptide to be reduced according to the process of the invention.

[0964] Accordingly, the present invention in particular relates to cells, cell cultures, tissues, parts—such as, for example, in the case of plant organisms, plant tissue, for example leaves, roots and the like—or propagation material derived from such organisms, or intact plants comprising a reduced activity or expression of nucleic acid molecule comprising a nucleic acid molecule as depicted in, column 5 or 7 of table I A or B, application no. 1, or comprising a reduced activity or expression of a polypeptide comprising a polypeptide as depicted in column 5 or 7 of table II A or B, application no. 1, or comprising a consensus sequence or a polypeptide motif as depicted in column 7 of Table IV, application no. 1.

[0965] The terms “recombinant (host)” and “transgenic (host)” are used interchangeably in this context. Naturally, these terms refer not only to the host organism or target cell in question, but also to the progeny, or potential progeny, of these organisms or cells. Since certain modifications may occur in subsequent generations owing to mutation or environmental effects, such progeny is not necessarily identical with the parental cell, but still comes within the scope of the term as used herein.

[0966] Suitable organisms for the process according to the invention or as hosts are those as disclosed above. The organisms used as hosts are microorganisms, such as bacteria, fungi, yeasts or algae or plants, such as dicotyledonous or monocotyledonous plants.

[0967] In principle all plants can be used as host organism, especially the plants mentioned above as source organism. Preferred transgenic plants are, for example, selected from the families Aceraceae, Anacardiaceae, Apiaceae, Asteraceae, Brassicaceae, Cactaceae, Cucurbitaceae, Euphorbiaceae, Fabaceae, Malvaceae, Nymphaeaceae, Papaveraceae, Rosaceae, Salicaceae, Solanaceae, Arecaceae, Bromeliaceae, Cyperaceae, Iridaceae, Liliaceae, Orchidaceae, Gentianaceae, Labiaceae, Magnoliaceae, Ranunculaceae, Carifolaceae, Rubiaceae, Scrophulariaceae, Caryophyllaceae, Ericaceae, Polygonaceae, Violaceae, Juncaceae or Poaceae and preferably from a plant selected from the group of the families Apiaceae, Asteraceae, Brassicaceae, Cucurbitaceae, Fabaceae, Papaveraceae, Rosaceae, Solanaceae, Liliaceae or Poaceae. Preferred are crop plants such as plants advantageously selected from the group of the genus peanut, oilseed rape, canola, sunflower, safflower, olive, sesame, hazelnut, almond, avocado, bay, pumpkin/squash, linseed, soya, pistachio, borage, maize, wheat, rye, oats, sorghum and millet, triticale, rice, barley, cassaya, potato, sugarbeet, egg plant, alfalfa, and perennial grasses and forage plants, oil palm, vegetables (brassicas, root vegetables, tuber vegetables, pod vegetables, fruiting vegetables, onion vegetables, leafy vegetables and stem vegetables), buckwheat, Jerusalem artichoke, broad bean, vetches, lentil, dwarf bean, lupin, clover and Lucerne for mentioning only some of them.

[0968] Preferred plant cells, plant organs, plant tissues or parts of plants originate from the under source organism mentioned plant families, preferably from the abovementioned plant genus, more preferred from abovementioned plants species.

[0969] In one embodiment of the invention plant cells, plant organs, plant tissues or parts of plants are selected from the group comprising corn, soy, oil seed rape (including canola and winter oil seed reap), cotton, wheat and rice.

[0970] Yet another embodiment of the invention is a composition comprising the protein of the invention, the nucleic acid molecule of the invention, the polypeptide of the invention, the nucleic acid construct or the vector of the invention, the antagonist of the invention, the antibody of the invention and optionally a agricultural acceptable carrier.

[0971] In yet another aspect, the invention also relates to harvestable parts and to propagation material of the transgenic plants according to the invention which either contain transgenic plant cells expressing a nucleic acid molecule according to the invention or which contains cells which show a reduced, repressed, decreased or deleted cellular activity selected from the group consisting of At1g74730-protein, At3g63270-protein, protein kinase, protein serine/threonine phosphatase, and/or SET domain-containing protein, e.g. which show a reduced, repressed, decreased or deleted activity of the polypeptide or the nucleic acid molecule to be reduced in the process of the invention, in particular a reduced or deleted activity of a polypeptide comprising a polypeptide as depicted in column 5 or 7 of table II, application no. 1, preferably as depicted in table IIB, application no. 1, or comprising a consensus sequence or a polypeptide motif as depicted in column 7 of table IV, application no. 1, or of a gene product of a nucleic acid molecule comprising the polynucleotide as depicted in column 5 or 7 of table I, application no. 1, preferably as depicted in table IB, application no. 1.

[0972] Harvestable parts can be in principle any useful parts of a plant, for example, flowers, pollen, seedlings, tubers, leaves, stems, fruit, seeds, roots etc. Propagation material includes, for example, seeds, fruits, cuttings, seedlings, tubers, rootstocks etc. Preferred are seeds, seedlings, tubers or fruits as harvestable or propagation material.

[0973] In one embodiment, the present invention relates to a method for the identification of a gene product conferring an increased yield, in particular an increased yield-related trait, e.g. an increased nutrient use efficiency, such as an enhanced nitrogen use efficiency and/or increased tolerance to environmental stress and/or increased biomass production as compared to a corresponding, e.g. non-transformed, wild type plant, comprising the following steps:
[0974] (a) contacting, e.g. hybridising, the one, some or all nucleic acid molecules of a sample, e.g. cells, tissues, plants or microorganisms or a nucleic acid library , which can contain a candidate gene encoding a gene product conferring an increased yield, in particular an increased yield-related trait, e.g. an increased nutrient use efficiency, such as an enhanced nitrogen use efficiency and/or increased tolerance to environmental stress and/or increased biomass production as compared to a corresponding, e.g. non-transformed, wild type plant after reduction or deletion of its expression, with a nucleic acid molecule as depicted in column 5 or 7 of table I A or B, application no. 1, or a functional homologue thereof;
[0975] (b) identifying the nucleic acid molecules, which hybridize under relaxed stringent conditions with said nucleic acid molecule, in particular to the nucleic acid molecule sequence as depicted in column 5 or 7 of table I, application no. 1, and, optionally, isolating the full length cDNA clone or complete genomic clone;
[0976] (c) identifying the candidate nucleic acid molecules or a fragment thereof in host cells, preferably in a plant cell;
[0977] (d) reducing or deletion the expressing of the identified nucleic acid molecules in the host cells;
[0978] (e) assaying the level of enhanced yield, in particular a yield-related trait, e.g. nitrogen use efficiency and/or biomass production as compared to a corresponding, e.g. non-transformed, wild type plant in the host cells; and
[0979] (f) identifying the nucleic acid molecule and its gene product which reduction or deletion of expression confers an increased yield, in particular an increased yield-related trait, e.g. an increased nutrient use efficiency, such as an enhanced nitrogen use efficiency and/or increased tolerance to environmental stress and/or increased biomass production as compared to a corresponding, e.g. non-transformed, wild type plant in the host cell after expression compared to the wild type.

[0980] Relaxed hybridisation conditions are: After standard hybridisation procedures washing steps can be performed at low to medium stringency conditions usually with washing conditions of 40°-55° C. and salt conditions between 2×SSC and 0.2×SSC with 0.1% SDS in comparison to stringent washing conditions as e.g. 60° to 68° C. with 0.1% SDS. Further examples can be found in the references listed above for the string-end hybridization conditions. Usually washing steps are repeated with increasing stringency and length until a useful signal to noise ratio is detected and depend on many factors as the target, e.g. its purity, GC-content, size etc, the probe, e.g. its length, is it a RNA or a DNA probe, salt conditions, washing or hybridisation temperature, washing or hybridisation time etc.

[0981] In another embodiment, the present invention relates to a method for the identification of a gene product the reduction of which confers an increased yield, in particular an increased yield-related trait, e.g. an increased nutrient use efficiency, such as an enhanced nitrogen use efficiency and/or increased tolerance to environmental stress and/or increased biomass production as compared to a corresponding, e.g. non-transformed, wild type plant, comprising the following steps:
[0982] (a) identifying a nucleic acid molecule in an organism, which is at least 20%, preferably 25%, more preferably 30%, even more preferred are 35%. 40% or 50%, even more the nucleic acid molecule encoding a protein comprising the polypeptide molecule as depicted in column 5 or 7 of table II, application no. 1, or comprising a consensus sequence or a polypeptide motif as depicted in column 7 of able IV, application no. 1, or being encoded by a nucleic acid molecule comprising a polynucleotide as depicted in column 5 or 7 of table I, application no. 1, or a homologue thereof as described herein, for example via homology search in a data bank;
[0983] (b) repressing, reducing or deleting the expression of the identified nucleic acid molecules in the host cells;
[0984] (c) assaying the level of enhanced yield, in particular a yield-related trait, e.g. nitrogen use efficiency and/or biomass production as compared to a corresponding, e.g. non-transformed, wild type plant; and
[0985] (d) identifying the host cell, in which the repressing, reducing or deleting of the nucleic acid molecule or its gene product confers an increased yield, in particular an increased yield-related trait, e.g. an increased nutrient use efficiency, such as an enhanced nitrogen use efficiency and/or increased tolerance to environmental stress and/or increased biomass production as compared to a corresponding, e.g. non-transformed, wild type plant.

[0986] In another embodiment, the present invention relates to a method for the identification of a gene product the reduction of which confers an increased yield, in particular an increased yield-related trait, e.g. an increased nutrient use efficiency, such as an enhanced nitrogen use efficiency and/or increased tolerance to environmental stress and/or increased biomass production as compared to a corresponding, e.g. non-transformed, wild type plant, comprising the following steps:
[0987] (a) providing an organism or host cells according to the invention, in which an nucleic acid molecule encoding a protein comprising the polypeptide has been inactivated, deleted or otherwise reduced in its activity;
[0988] (b) transforming the organism with an cDNA expression or an genomic library or any other nucleic acid library capable of efficiently expressing the encompassed nucleic acid sequence
[0989] (c) assaying the level of enhanced yield, in particular a yield-related trait, e.g. nitrogen use efficiency and/or biomass production as compared to a corresponding, e.g. non-transformed, wild type plant; and
[0990] (d) identifying the host cell, in which the introduced nucleic acid sequence reverses the increased yield, in particular an increased yield-related trait, e.g. an increased nutrient use efficiency, such as an enhanced nitrogen use efficiency and/or increased tolerance to environmental stress and/or increased biomass production as compared to a corresponding, e.g. non-transformed, wild type plant, reestablishing the wild type situation.

[0991] In one embodiment the different methods for the identification of a gene product the reduction of which confers an increased yield, in particular an increased yield-related trait, e.g. an increased nutrient use efficiency, such as an enhanced nitrogen use efficiency and/or increased tolerance to environmental stress and/or increased biomass production as compared to a corresponding, e.g. non-transformed, wild type plant can be combined in any combination in order to optimize the method.

[0992] Furthermore, in one embodiment, the present invention relates to a method for the identification of a compound stimulating the increased yield, in particular an increased yield-related trait, e.g. an increased nutrient use efficiency, such as an enhanced nitrogen use efficiency and/or increased tolerance to environmental stress and/or increased biomass production as compared to a corresponding, e.g. non-transformed, wild type plant to said plant comprising:
[0993] (a) contacting cells which express the polypeptide as depicted in column 5 or 7 of table II, application no. 1, or being encoded by a nucleic acid molecule comprising a polynucleotide as depicted in column 5 or 7 of table I, application no. 1, or a homologue thereof as described herein or its mRNA with a candidate compound under cell cultivation conditions;
[0994] (b) assaying a reduction, decrease or deletion in expression of said polypeptide or said mRNA;
[0995] (c) comparing the expression level to a standard response made in the absence of said candidate compound; whereby, a reduced, decreased or deleted expression over the standard indicates that the compound is stimulating the increased yield, in particular an increased yield-related trait, e.g. an increased nutrient use efficiency, such as an enhanced nitrogen use efficiency and/or increased tolerance to environmental stress and/or increased biomass production as compared to a corresponding, e.g. non-transformed, wild type plant.

[0996] Furthermore, in one embodiment, the present invention relates to a method for the screening for antagonists of the activity of the polypeptide as depicted in column 5 or 7 of table II, application no. 1, or being encoded by a nucleic acid molecule comprising a polynucleotide as depicted in column 5 or 7 of table I, application no. 1, or a homologue thereof as described herein, e.g. a polypeptide conferring an increased yield, in particular an increased yield-related trait, e.g. an increased nutrient use efficiency, such as an enhanced nitrogen use efficiency and/or increased tolerance to environmental stress and/or increased biomass production as compared to a corresponding, e.g. non-transformed, wild type plant after decreasing its cellular activity, e.g. of the activity of a polypeptide having the activity represented by the protein or nucleic acid molecule to be reduced in the process of the invention or of the polypeptide of the invention comprising:
[0997] (a) contacting cells, tissues, plants or microorganisms which express the polypeptide according to the invention with a candidate compound or a sample comprising a plurality of compounds under conditions which permit the expression the polypeptide of the present invention;
[0998] (b) assaying the level of enhanced yield, in particular yield-related trait, e.g. nitrogen use efficiency and/or biomass production or the polypeptide expression level in the cell, tissue, plant or microorganism or the media the cell, tissue, plant or microorganisms is cultured or maintained in; and
[0999] (c) identifying an antagonist by comparing the measured level of enhanced yield, in particular of an yield-related trait, e.g. nitrogen use efficiency and/or biomass production or polypeptide expression level with a standard level of yield, in particular of an yield-related trait, e.g. nitrogen use efficiency and/or biomass production or polypeptide expression level measured in the absence of said candidate compound or a sample comprising said plurality of compounds, whereby an increased level of yield, in particular of an yield-related trait, e.g. nitrogen use efficiency and/or biomass production over the standard indicates that the compound or the sample comprising said plurality of compounds is an antagonist.

[1000] Yet another embodiment of the invention relates to a process for the identification of a compound conferring increased yield, in particular an increased yield-related trait, e.g. an increased nutrient use efficiency, such as an enhanced nitrogen use efficiency and/or increased tolerance to environmental stress and/or increased biomass production as compared to a corresponding, e.g. non-transformed, wild type plant in a plant; comprising the following step:
[1001] (a) culturing or maintaining a plant or animal cell or their tissues or microorganism expressing a polypeptide as depicted in column 5 or 7 of table II, application no. 1, or being encoded by a nucleic acid molecule comprising a polynucleotide as depicted in column 5 or 7 of table I, application no. 1, or a homologue thereof as described herein or a polynucleotide encoding said polypeptide and providing a readout system capable of interacting with the polypeptide under suitable conditions which permit the interaction of the polypeptide with this readout system in the presence of a chemical compound or a sample comprising a plurality of chemical compounds and capable of providing a detectable signal in response to the binding of a chemical compound to said polypeptide under conditions which permit the depression of said readout system and of the protein as depicted in column 5 or 7 of Table II or being encoded by a nucleic acid molecule comprising a polynucleotide as depicted in column 5 or 7 of table I, application no. 1, or a homologue thereof as described herein; and
[1002] (b) identifying if the chemical compound is an effective antagonist by detecting the presence or absence or decrease or increase of a signal produced by said readout system.

[1003] Said compound may be chemically synthesized or microbiologically produced and/or comprised in, for example, samples, e.g., cell extracts from, e.g. plants, animals or microorganisms, e.g. pathogens. Furthermore, said compound(s) may be known in the art but hitherto not known to be capable of suppressing the polypeptide of the present invention. The reaction mixture may be a cell free extract or may comprise a cell or tissue culture. Suitable set ups for the process for identification of a compound of the invention are known to the person skilled in the art and are, for example, generally described in Alberts et al., Molecular Biology of the Cell, third edition (1994), in particular Chapter 17. The compounds may be, e.g., added to the reaction mixture, culture medium, injected into the cell or sprayed onto the plant.

[1004] If a sample containing a compound is identified in the process, then it is either possible to isolate the compound from the original sample identified as containing the compound capable of increasing yield, in particular a yield-related trait, e.g. nitrogen use efficiency and/or the biomass production as compared to a corresponding, e.g. non-transformed, wild type plant, or one can further subdivide the original sample, for example, if it consists of a plurality of different compounds, so as to reduce the number of different substances per sample and repeat the method with the subdivisions of the original sample. Depending on the complexity of the samples, the steps described above can be performed several times, preferably until the sample identified according to the said process only comprises a limited number of or only one substance(s). Preferably said sample comprises substances of similar chemical and/or physical properties, and most preferably said substances are identical. Preferably, the compound identified according to the described method above or its derivative is further formulated in a form suitable for the application in plant breeding or plant cell and tissue culture.

[1005] The compounds which can be tested and identified according to said process may be expression libraries, e.g., cDNA expression libraries, peptides, proteins, nucleic acids, antibodies, small organic compounds, hormones, peptidomimetics, PNAs or the like (Milner, Nature Medicine 1, 879 (1995); Hupp, Cell 83, 237 (1995); Gibbs, Cell 79, 193 (1994) and references cited supra). Said compounds can also be functional derivatives or analogues of known inhibitors or activators. Methods for the preparation of chemical derivatives and analogues are well known to those skilled in the art and are described in, for example, Beilstein, Handbook of Organic Chemistry, Springer edition New York Inc., 175 Fifth Avenue, New York, N.Y. 10010 U.S.A. and Organic Synthesis, Wiley, New York, USA. Furthermore, said derivatives and analogues can be tested for their effects according to methods known in the art. Furthermore, peptidomimetics and/or computer aided design of appropriate derivatives and analogues can be used, for example, according to the methods described above. The cell or tissue that may be employed in the process preferably is a host cell, plant cell or plant tissue of the invention described in the embodiments hereinbefore.

[1006] Thus, in a further embodiment the invention relates to a compound obtained or identified according to the method for identifying an antagonist of the invention said compound being an antagonist of the polypeptide of the present invention.

[1007] Accordingly, in one embodiment, the present invention further relates to a compound identified by the method for identifying a compound of the present invention.

[1008] Said compound is, for example, an antagonistic homolog of the polypeptide of the present invention. Antagonistic homologues of the polypeptide to be reduced in the process of the present invention can be generated by mutagenesis, e.g., discrete point mutation or truncation of the polypeptide of the present invention. As used herein, the term “antagonistic homologue” refers to a variant form of the protein, which acts as an antagonist of the activity of the polypeptide of the present invention. An antagonist of a protein as depicted in column 5 or 7 of table II or being encoded by a nucleic acid molecule comprising a polynucleotide as depicted in column 5 or 7 of table I or a homologue thereof as described herein, has at least partly lost the biological activities of the polypeptide of the present invention. In particular, said antagonist confers a decrease of the expression level of the polypeptide as depicted in column 5 or 7 of table II, application no. 1, or being encoded by a nucleic acid molecule comprising a polynucleotide as depicted in column 5 or 7 of table I application no. 1, or a homologue thereof as described herein and thereby the expression of said antagonist in an organisms or part thereof confers the increased yield, in particular an increased yield-related trait, e.g. an increased nutrient use efficiency, such as an enhanced nitrogen use efficiency and/or increased tolerance to environmental stress and/or increased biomass production as compared to a corresponding, e.g. non-transformed, wild type plant. A typical antagonists in that sense would be a dominant negative version of the nucleic acid molecule or polypeptide which activity is to be reduced in the process of the invention, for example a protein which still can participates in a protein complex, but cannot anymore fulfill its original biological, for example enzymatical function, thereby nearly inactivating the complete complex.

[1009] In one embodiment, the invention relates to an antibody specifically recognizing the compound or antagonist of the present invention.

[1010] The invention also relates to a diagnostic composition comprising at least one of the aforementioned nucleic acid molecules, antisense nucleic acid molecule, RNAi, snRNA, dsRNA, siRNA, miRNA, ta-siRNA, cosuppression molecule, ribozyme, vectors, proteins, antibodies or compounds of the invention and optionally suitable means for detection.

[1011] The diagnostic composition of the present invention is suitable for the isolation of mRNA from a cell and contacting the mRNA so obtained with a probe comprising a nucleic acid probe as described above under hybridizing conditions, detecting the presence of mRNA hybridized to the probe, and thereby detecting the expression of the protein in the cell. Further methods of detecting the presence of a protein according to the present invention comprise immunotechniques well known in the art, for example enzyme linked immunoadsorbent assay. Furthermore, it is possible to use the nucleic acid molecules according to the invention as molecular markers or primers in plant breeding. Suitable means for detection are well known to a person skilled in the art, e.g. buffers and solutions for hydridization assays, e.g. the aforementioned solutions and buffers, further and means for Southern-, Western-, Northern- etc. -blots, as e.g. described in Sambrook et al. are known. In one embodiment diagnostic composition contain PCR primers designed to specifically detect the presense or the expression level of the nucleic acid molecule to be reduced in the process of the invention, e.g. of the nucleic acid molecule of the invention, or to discriminate between different variants or alleles of the nucleic acid molecule of the invention or which activity is to be reduced in the process of the invention.

[1012] In another embodiment, the present invention relates to a kit comprising the nucleic acid molecule, the vector, the host cell, the polypeptide, or the antisense, RNAi, snRNA, dsRNA, siRNA, miRNA, ta-siRNA, cosuppression molecule, or ribozyme molecule, or the viral nucleic acid molecule, the antibody, plant cell, the plant or plant tissue, the harvestable part, the propagation material and/or the compound and/or antagonist identified according to the method of the invention.

[1013] The compounds of the kit of the present invention may be packaged in containers such as vials, optionally with/in buffers and/or solution. If appropriate, one or more of said components might be packaged in one and the same container. Additionally or alternatively, one or more of said components might be adsorbed to a solid support as, e.g. a nitrocellulose filter, a glass plate, a chip, or a nylon membrane or to the well of a micro titerplate. The kit can be used for any of the herein described methods and embodiments, e.g. for the production of the host cells, transgenic plants, pharmaceutical compositions, detection of homologous sequences, identification of antagonists or agonists, as food or feed or as a supplement thereof or as supplement for the treating of plants, etc.

[1014] Further, the kit can comprise instructions for the use of the kit for any of said embodiments, in particular for the use for producing organisms or part thereof having an increased yield, in particular an increased yield-related trait, e.g. an increased nutrient use efficiency, such as an enhanced nitrogen use efficiency and/or increased tolerance to environmental stress and/or increased biomass production as compared to a corresponding, e.g. non-transformed, wild type plant.

[1015] In one embodiment said kit comprises further a nucleic acid molecule encoding one or more of the aforementioned protein, and/or an antibody, a vector, a host cell, an antisense nucleic acid, a plant cell or plant tissue or a plant. In another embodiment said kit comprises PCR primers to detect and discrimante the nucleic acid molecule to be reduced in the process of the invention, e.g. of the nucleic acid molecule of the invention.

[1016] In a further embodiment, the present invention relates to a method for the production of an agricultural composition providing the nucleic acid molecule for the use according to the process of the invention, the nucleic acid molecule of the invention, the vector of the invention, the antisense, RNAi, snRNA, dsRNA, siRNA, miRNA, ta-siRNA, cosuppression molecule, ribozyme, or antibody of the invention, the viral nucleic acid molecule of the invention, or the polypeptide of the invention or comprising the steps of the method according to the invention for the identification of said compound or antagonist; and formulating the nucleic acid molecule, the vector or the polypeptide of the invention or the antagonist, or compound identified according to the methods or processes of the present invention or with use of the subject matters of the present invention in a form applicable as plant agricultural composition.

[1017] In another embodiment, the present invention relates to a method for the production of supporting plant culture composition comprising the steps of the method of the present invention; and formulating the compound identified in a form acceptable as agricultural composition.

[1018] Under “acceptable as agricultural composition” is understood, that such a composition is in agreement with the laws regulating the content of fungicides, plant nutrients, herbicides, etc. Preferably such a composition is without any harm for the protected plants and the animals (humans included) fed therewith.

[1019] The nucleic acid molecules disclosed herein, in particular the nucleic acid as depicted column 5 or 7 of table I A or B, application no. 1, have a variety of uses. First, they may be used to identify an organism or a close relative thereof. Also, they may be used to identify the presence thereof or a relative thereof in a mixed population of plants. By probing the extracted genomic DNA of a culture of a unique or mixed population of plants under stringent conditions with a probe spanning a region of the gene of the present invention which is unique to this, one can ascertain whether the present invention has been used or whether it or a close relative is present.

[1020] Further, the nucleic acid molecule disclosed herein, in particular the nucleic acid molecule as depicted column 5 or 7 of table I A or B, application no. 1, may be sufficiently homologous to the sequences of related species such that these nucleic acid molecules may serve as markers for the construction of a genomic map in related organism or for association mapping. Furthermore natural variation in the genomic regions corresponding to nucleic acids disclosed herein, in particular the nucleic acid molecule as depicted column 5 or 7 of table I A or B, application no. 1, or homologous thereof may lead to variation in the activity of the proteins disclosed herein, in particular the proteins comprising polypeptides as depicted in column 5 or 7 of table II A or B, application no. 1, or comprising the consensus sequence or the polypeptide motif as shown in column 7 of table IV, application no. 1, and their homologous and in consequence in natural variation.

[1021] In consequence natural variation eventually also exists in form of less active allelic variants leading already to a relative increased yield, in particular an increased yield-related trait, e.g. an increased nutrient use efficiency, such as an enhanced nitrogen use efficiency and/or increased tolerance to environmental stress and/or increased biomass production.

[1022] Accordingly, the present invention relates to a method for breeding plants, comprising
[1023] (a) selecting a first plant variety with increased yield, in particular an increased yield-related trait, e.g. an increased nutrient use efficiency, such as an enhanced nitrogen use efficiency and/or increased tolerance to environmental stress and/or increased biomass production as compared to a corresponding, e.g. non-transformed, wild type plant by reducing, repressing, decreasing or deleting the expression of a polypeptide or nucleic acid molecule which activity is reduced in the process of the present invention, e.g. as disclosed herein, in particular of a nucleic acid molecule comprising a nucleic acid molecule as depicted in column 5 or 7 of table I A or B, application no. 1, or a polypeptide comprising a polypeptide as shown in column 5 or 7 of table II A or B, application no. 1, or comprising a consensus sequence or a polypeptide motif as depicted in column 7 of table IV, application no. 1, or a homologue thereof as described herein;
[1024] (b) associating the increased yield, in particular an increased yield-related trait, e.g. an increased nutrient use efficiency, such as an enhanced nitrogen use efficiency and/or increased tolerance to environmental stress and/or increased biomass production as compared to a corresponding, e.g. non-transformed, wild type plant with the expression level or the genomic structure of a gene encoding said polypeptide or said nucleic acid molecule;
[1025] (c) crossing the first plant variety with a second plant variety, which significantly differs in its yield, in particular its yield-related trait, e.g. nitrogen use efficiency and/or its biomass production; and
[1026] (d) identifying, which of the offspring varieties has got the increased yield, in particular an increased yield-related trait, e.g. an increased nutrient use efficiency, such as an enhanced nitrogen use efficiency and/or increased tolerance to environmental stress and/or increased biomass production as compared to a corresponding, e.g. non-transformed, wild type plant by means of analyzing level of yield, in particular of an yield-related trait, e.g. nitrogen use efficiency and/or biomass production or the expression of said polypeptide or nucleic acid molecule or the genomic structure of the genes encoding said polypeptide or nucleic acid molecule of the invention.

[1027] In one embodiment, the expression level of the gene according to step (b) is reduced.

[1028] The nucleic acid molecules of the invention are also useful for evolutionary and protein structural studies. By comparing the sequences, e.g. as depicted in column 5 or 7 of table I, application no. 1, to those encoding similar enzymes from other organisms, the evolutionary relatedness of the organisms can be assessed. Similarly, such a comparison permits an assessment of which regions of the sequence are conserved and which are not, which may aid in determining those regions of the protein which are essential for the functioning of the enzyme. This type of determination is of value for protein engineering studies and may give an indication of what the protein can tolerate in terms of mutagenesis without losing function.

[1029] Accordingly, the nucleic acid molecule disclosed herein, e.g. the nucleic acid molecule which activity is to be reduced according to the process of the invention, e.g. as depicted in column 5 or 7 of table I, application no. 1, or a homologue thereof, can be used for the identification of other nucleic acids conferring an increased yield, in particular an increased yield-related trait, e.g. an increased nutrient use efficiency, such as an enhanced nitrogen use efficiency and/or increased tolerance to environmental stress and/or increased biomass production as compared to a corresponding, e.g. non-transformed, wild type plant after reduction, repression, decrease or deletion of their expression.

[1030] Further, disclosed herein, e.g. the nucleic acid molecule which activity is to be reduced according to the process of the invention, e.g. as depicted in column 5 or 7 of table I, application no. 1, or a homologue thereof, in particular the nucleic acid molecule of the invention, or a fragment or a gene conferring the expression of the encoded expression product, e.g. the polypeptide of the invention, can be used for marker assisted breeding or association mapping of yield, in particular of an yield-related trait, e.g. nitrogen use efficiency and/or biomass production related traits.

[1031] These and other embodiments are disclosed and encompassed by the description and examples of the present invention.

[1032] Further literature concerning any one of the methods, uses and compounds to be employed in accordance with the present invention may be retrieved from public libraries, using for example electronic devices.

[1033] For example the public database “Medline” may be utilized which is available on the Internet, for example under hftp://www.ncbi.nlm.nih.gov/PubMed/medline.html. Further databases and addresses, such as hftp://www.ncbi.nlm.nih.gov/, hftp://www.infobiogen.fr/, hftp://www.fmi.ch/biology/research-tools.html, hftp://www.tigr.org/, are known to the person skilled in the art and can also be obtained using, e.g., hftp://www.lycos.com. An overview of patent information in biotechnology and a survey of relevant sources of patent information useful for retrospective searching and for current awareness is given in Berks, TIBTECH 12, 352 (1994).

[1034] Further, the present invention relates to a method for producing a plant with increased yield as compared to a corresponding wild type plant, e.g. a transgenic plant, which comprises:
[1035] (a) deleting, decreasing or repressing, in a plant cell nucleus, a plant cell, a plant or a part thereof, one or more said activities; and
[1036] (b) cultivating or growing the plant cell, the plant or the part thereof under conditions which permit the development of the plant cell, the plant or the part thereof; and
[1037] (c) recovering a plant from said plant cell nucleus, a plant cell, a plant part, showing increased yield as compared to a corresponding, e.g. non-transformed, origin or wild type plant;
[1038] (d) and optionally, selecting the plant or a part thereof, showing increased yield, for example showing an increased or improved yield-related trait, e.g. an improved nutrient use efficiency and/or abiotic stress resistance, as compared to a corresponding, e.g. non-transformed, wild type plant cell, e.g. which shows visual symptoms of deficiency and/or death.

[1039] In one further embodiment, the present invention also relates to a method for the identification of a plant with an increased yield comprising screening a population of one or more plant cell nuclei, plant cells, plant tissues or plants or parts thereof for the expression level of an nucleic acid coding for an polypeptide conferring said activity as indicated in Table I, comparing the level of expression with a reference; identifying one or more plant cell nuclei, plant cells, plant tissues or plants or parts thereof with a lower expression level compared to the reference, and optionally producing a plant from the identified plant cell nuclei, cell or tissue. In a further step the identified plant, or the part thereof, can be tested for its yield, e.g. yield-related trait, e.g. nitrogen use efficiency. The method can be repeated in parts or in whole once or more.

[1040] In another embodiment, the present invention relates to a method for increasing yield of a population of plants, comprising checking the planting conditions, e.g. ground nitrogen content, average temperature, water supply, in the area for planting, comparing the conditions with the optimal conditions of a plant species or a variety considered for planting, e.g. the origin or wild type plant mentioned herein, planting, and growing the plant of the invention if one or more of the conditions, in particular the ground nitrogen content, are not optimal for the planting and growing of a plant species or the variety considered for planting not produced according to the method of the invention, e.g. for the origin or wild type plant.

[1041] Further, in one embodiment, the method of the present invention comprises harvesting the plant or a part of the plant produced or planted and producing fuel with or from the harvested plant or part thereof. Further, in one embodiment, the method of the present invention comprises harvesting a plant part useful for starch isolation and isolating starch from this plant part, wherein the plant is a plant useful for starch production, e.g. potato. Further, in one embodiment, the method of the present invention comprises harvesting a plant part useful for oil isolation and isolating oil from this plant part, wherein the plant is a plant useful for oil production, e.g. oil seed rape or Canola, cotton, soy, or sunflower.

[1042] For example, in one embodiment, the oil content in the corn seed is increased. Thus, the present invention relates to the production of plants with increased oil content per acre (harvestable oil).

[1043] For example, in one embodiment, the oil content in the soy seed is increased. Thus, the present invention relates to the production of soy plants with increased oil content per acre (harvestable oil).

[1044] For example, in one embodiment, the oil content in the OSR seed is increased. Thus, the present invention relates to the production of OSR plants with increased oil content per acre (harvestable oil).

[1045] For example, the present invention relates to the production of cotton plants with increased oil content per acre (harvestable oil).

[1046] Method for determining the nitrogen content of test soil comprising the following steps:
[1047] a) growing of a plant produced according to the invention in said soil,
[1048] b) comparing the yield and determining the yield difference of the plant produced according to the invention with the yield of a control plant growing in said soil, e.g. with a wild-type or an origin plant, in particular a plant which was not produced according to the process of the invention to produce a plant with increased yield,
   whereby an enhanced yield of the plant of the present invention compared to said control plant, e.g. a plant not produced according to a method of the invention, indicates an nitrogen deficiency of the soil

[1049] In a further step the method can comprise steps for controlling the result of said method for determining the nitrogen content of soil:
[1050] c) growing the plant produced according to the invention in control soil without nitrogen content deficiency
[1051] d) comparing the yield and determining the yield difference of the plant produced according to the invention with the yield of a control plant growing in said control soil, e.g. with a wild-type or an origin plant, in particular a plant which was not produced according to the process of the invention to produce a plant with increased yield,
   whereby an enhanced yield of the plant of the present invention compared to said control plant, e.g. a plant not produced according to a method of the invention, indicates an no nitrogen deficiency of the test soil.

[1052] Method for the identification of a plant with increased nitrogen use efficiency comprising the following steps:
[1053] a) growing of a plant produced according to the invention in a soil,
[1054] b) comparing the yield and determining the yield difference of the plant produced according to the invention with the yield of a control plant or a population of control plants growing in said soil, e.g. with one or a population of wild-type or origin plants, in particular with one or more plant species which were not produced according to the process of the invention to produce a plant with increased yield,
[1055] c) identifying a control plant species which shows an higher yield, in particular an higher nitrogen use efficiency compared to the plant produced according to the invention,
   whereby the higher yield of the control plant compared to said plant of the present invention, e.g. of a plant not produced according to a method of the invention, indicates an plant with an improved nitrogen use efficiency.

[1056] In one embodiment, the soil is a nitrogen deficient soil.

[1057] In one embodiment, the plant of the invention is grown under conditions of reduced NUE fertilization compared to a control or wild type plant, e.g. a plant not being produced according the method of the invention. Preferably the yield of the plant of the invention or produced according to the method of the invention is not reduced compared the normal NUE fertilization or is less reduced as compared to a control or wild type plant, e.g. a plant not being produced according the method of the invention. In an other embodiment, the plant of the invention is grown under the same conditions, e.g. NUE fertilization, as a control or wild type plant, e.g. a plant not being produced according the method of the invention. Preferably the yield of the plant of the invention or produced according to the method of the invention is increased compared to a control or wild type plant, e.g. a plant not being produced according the method of the invention.

[1058] In one embodiment, the yield is protein yield. Accordingly, in one embodiment, increased yield means an increased amount of bound nitrogen, e.g. of amino acid content or protein amount in a plant or a part thereof, e.g. the seed.

[1059] Incorporated by reference are further the following applications of which the present applications claims the priority: EP 07150295.9 filed on Jan. 21, 2007.

[1060] The present invention is illustrated by the examples and the figures (FIG. 1-3), which follow:

### EXAMPLE

[1061] Engineering of Arabidopsis plants by inactivation or down-regulation of yield related genes, in particular of an yield-related trait genes, e.g. nitrogen use efficiency/biomass related genes.

[1062] Vector Preparation

[1063] A binary knock out vector was constructed based on the modified pPZP binary vector backbone (comprising the kanamycin-gene for bacterial selection; Hajdukiewicz P. et al., Plant Mol. Biol., 25, 989 (1994)) and the selection marker bar-gene (De Block et al., EMBO J. 6, 2513 (1987)) driven by the mas2′1′ and mas271f promoters (Velten et al., EMBO J. 3, 2723 (1984); Mengiste, Amedeo and Paszkowski, Plant J. 12, 945 (1997)). The resulting vector, used for insertional mutagenesis, was pMTX1a300 SEQ ID NO: 1.

[1064] Examples of other usable binary vectors for insertional mutagenesis are pBIN19, pBI101, pBinAR, pSun or pGPTV. An overview over binary vectors and their specific features is given in Hellens et al., Trends in Plant Science 5, 446 (2000) and in Guerineau F., Mullineaux P., Plant transformation and expression vectors in plant molecular biology, LABFAX Series, (Croy R. R. D., ed.) pp. 121-127 Bios Scientific Publishers, Oxford (1993).

[1065] Transformation of Agrobacteria

[1066] The plasmid was transformed into Agrobacterium tumefaciens (GV3101 pMP90; Koncz and Schell, Mol. Gen. Genet. 204, 383 (1986)) using heat shock or electroporation protocols. Transformed colonies were grown on YEB medium and selected by respective antibiotics (Rif/Gent/Km) for 2 d at 28° C. These agrobacteria cultures were used for the plant transformation.

[1067] Arabidopsis thaliana of the ecotype C24 were grown and transformed according to standard conditions (Bechtold N., Ellis J., Pelletie, G., C.R. Acad. Sci. Paris 316, 1194 (1993); Bent A. F., Clough J. C., PLANT J. 16, 735 (1998)).

[1068] Transformed plants (F1) were selected by the use of their respective resistance marker. In case of BASTA®-resistance, plantlets were sprayed four times at an interval of 2 to 3 days with 0.02% BASTA® and transformed plants were allowed to set seeds. 50-100 seedlings (F2) were subjected again to marker selection, in case of BASTA-resistance by spaying with 0.1% BASTA® on 4 consecutive days during the plantlet phase. Plants segregating for a single resistance locus (approximately 3:1 resistant seedling to sensitive seedlings) were chosen for further analysis. From these lines three of the resistant seedlings (F2) were again allowed to set seeds and were tested for homozygosis through in-vitro germination of their seeds (F3) on agar medium containing the selection agent (BASTA®, 15 mg/L ammonium glufosinate, Pestanal, Riedel de Haen, Seelze, Germany). Those F2 lines which showed nearly 100% resistant offspring (F3) were considered homozygote and taken for functional analysis.

[1069] Plant screening (Arabidopsis) for growth under limited nitrogen supply

[1070] For screening of transgenic plants a specific culture facility was used. For high-throughput purposes plants were screened for biomass production on agar plates with limited supply of nitrogen (adapted from Estelle and Somerville, 1987). This screening pipeline consists of two level. Transgenic lines are subjected to subsequent level if biomass production was significantly improved in comparison to wild type plants. With each level number of replicates and statistical stringency was increased.

[1071] For the sowing, the seeds, which had been stored in the refrigerator (at −20° C.), were removed from the Eppendorf tubes with the aid of a toothpick and transferred onto the above-mentioned agar plates, with limited supply of nitrogen (0.05 mM KNO₃). In total, approximately 15-30 seeds were distributed horizontally on each plate (12×12 cm).

[1072] After the seeds had been sown, plates are subjected to stratification for 2-4 days in the dark at 4° C. After the stratification, the test plants were grown for 22 to 25 days at a 16-h-light, 8-h-dark rhythm at 20° C., an atmospheric humidity of 60% and a CO₂ concentration of approximately 400 ppm. The light sources used generate a light resembling the solar color spectrum with a light intensity of approximately 100 μE/m2s. After 10 to 11 days the plants are individualized. Improved growth under nitrogen limited conditions was assessed by biomass production of shoots and roots of transgenic plants in comparison to wild type control plants after 20-25 days growth.

[1073] Transgenic lines showing a significant improved biomass production in comparison to wild type plants are subjected to following experiment of the subsequent level:

[1074] Arabidopsis thaliana seeds are sown in pots containing a 1:1 (v:v) mixture of nutrient depleted soil (“Einheitserde Typ 0”, 30% clay, Tantau, Wansdorf Germany) and sand. Germination is induced by a four day period at 4° C., in the dark. Subsequently the plants are grown under standard growth conditions (photoperiod of 16 h light and 8 h dark, 20° C., 60% relative humidity, and a photon flux density of 200 μE). The plants are grown and cultured , inter alia they are watered every second day with a N-depleted nutrient solution. The N-depleted nutrient solution e.g. contains beneath water

| mineral nutrient | final concentration | |
|---|---|---|
| KCl | 3.00 | mM |
| MgSO₄ × 7H₂O | 0.5 | mM |
| CaCl₂ × 6H₂O | 1.5 | mM |
| K₂SO₄ | 1.5 | mM |
| NaH₂PO₄ | 1.5 | mM |
| Fe-EDTA | 40 | μM |
| H₃BO₃ | 25 | μM |
| MnSO₄ × H₂O | 1 | μM |
| ZnSO₄ × 7H₂O | 0.5 | μM |
| Cu₂SO₄ × 5H₂O | 0.3 | μM |
| Na₂MoO₄ × 2H₂O | 0.05 | μM |

After 9 to 10 days the plants are individualized . After a total time of 29 to 31 days the plants are harvested and rated by the fresh weight of the arial parts of the plants. The results thereof are summerized in table Va. The biomass increase has been measured as ratio of the fresh weight of the aerial parts of the respective transgene plant and the non-transgenic wild type plant.

TABLE Va
Nitrogen use efficiency

| SeqID | Locus | Biomass Increase |
|---|---|---|
| 27 | At1g74730 | 1.20 |
| 60 | At3g07670 | 1.11 |
| 94 | At3g63270 | 1.23 |
| 132 | At4g03080 | 1.10 |
| 171 | At5g65240 | 1.30 |

[1075] Plant Screening for Growth Under Low Temperature Conditions

[1076] In a standard experiment soil was prepared as 3.5:1 (v/v) mixture of nutrient rich soil (GS90, Tantau, Wansdorf, Germany) and sand. Pots were filled with soil mixture and placed into trays. Water was added to the trays to let the soil mixture take up appropriate amount of water for the sowing procedure. The seeds for transgenic A. thaliana plants were sown in pots (6 cm diameter). Stratification was established for a period of 3 days in the dark at 4° C.-5° C. Germination of seeds and growth was initiated at a growth condition of 20° C., approx. 60% relative humidity, 16h photoperiod and illumination with fluorescent light at 150-200 μmol/m2s. BASTA selection was done at day 9 after sowing by spraying pots with plantlets from the top. Therefore, a 0.07% (v/v) solution of BASTA concentrate (183g/l glufosinate-ammonium) in tap water was sprayed. The wild-type control plants were sprayed with tap water only (instead of spraying with BASTA dissolved in tap water) but were otherwise treated identically. Transgenic events and wildtype control plants were distributed randomly over the chamber. Watering was carried out every two days after covers were removed from the trays. Plants were individualized 12-13 days after sowing by removing the surplus of seedlings leaving one seedling in a pot. Cold (chilling to 11° C.-12° C.) was applied 14-16 days after sowing until the end of the experiment. For measuring biomass performance, plant fresh weight was determined at harvest time (36-37 days after sowing) by cutting shoots and weighing them. Plants were in the stage prior to flowering and prior to growth of inflorescence when harvested. Transgenic plants were compared to the non-transgenic wild-type control plants. Significance values for the statistical significance of the biomass changes were calculated by applying the ‘student's’ t test (parameters: two-sided, unequal variance).

Table Vb: Biomass Production of Transgenic A. Thaliana after Imposition of Chilling Stress.

[1077] Biomass production was measured by weighing plant rosettes. Biomass increase was calculated as ratio of average weight of plants of transgenic lines compared to average weight of wild-type control plants from the same experiment (>19 plants each). The mean biomass increase of transgenic plants is given (significance value=0.045).

| SeqID | Locus | Biomass Increase |
|---|---|---|
| 171 | At5g65240 | 1.15 |

[1078] Plant Screening for Yield Increase Under Standardised Growth Conditions

[1079] In this experiment, a plant screening for yield increase (in this case: biomass yield increase) under standardised growth conditions in the absence of substantial abiotic stress has been performed. In a standard experiment soil is prepared as 3.5:1 (v/v) mixture of nutrient rich soil (GS90, Tantau, Wansdorf, Germany) and quarz sand. Alternatively, plants were sown on nutrient rich soil (GS90, Tantau, Germany). Pots were filled with soil mixture and placed into trays. Water was added to the trays to let the soil mixture take up appropriate amount of water for the sowing procedure. The seeds for transgenic A. thaliana plants and their non-transgenic wild-type controls were sown in pots (6 cm diameter). Stratification was established for a period of 3-4 days in the dark at 4° C.-5° C. Germination of seeds and growth was initiated at a growth condition of 20° C., and approx. 60% relative humidity, 16h photoperiod and illumination with fluorescent light at approximately 150-200 μmol/m2s. BASTA selection was done at day 10 or day 11 (9 or 10 days after sowing) by spraying pots with plantlets from the top. In the standard experiment, a 0.07% (v/v) solution of BASTA concentrate (183g/l glufosinate-ammonium) in tap water was sprayed once or, alternatively, a 0.02% (v/v) solution of BASTA was sprayed three times. The wild-type control plants were sprayed with tap water only (instead of spraying with BASTA dissolved in tap water) but were otherwise treated identically. Plants were individualized 13-14 days after sowing by removing the surplus of seedlings and leaving one seedling in soil. Transgenic events and wild-type control plants were evenly distributed over the chamber.

[1080] Watering was carried out every two days after removing the covers in a standard experiment or, alternatively, every day. For measuring biomass performance, plant fresh weight was determined at harvest time (24-25 days after sowing) by cutting shoots and weighing them. Plants were in the stage prior to flowering and prior to growth of inflorescence when harvested. Transgenic plants were compared to the non-transgenic wild-type control plants. Significance values for the statistical significance of the biomass changes were calculated by applying the ‘student's’ t test (parameters: two-sided, unequal variance).

### Table Vd: Biomass Production of Transgenic A. Thaliana Grown Under Standardised Growth Conditions.

[1081] Biomass production was measured by weighing plant rosettes. Biomass increase was calculated as ratio of average weight of plants of transgenic lines compared to average weight of wild-type control plants from the same experiment (>20 plants each). The mean biomass increase of transgenic plants is given (significance value=0.002).

| SeqID | Target | Locus | Biomass Increase |
|---|---|---|---|
| 171 | nd | At5g65240 | 1.19 |

[1082] Analysis of the selected lines with enhanced yield, in particular an enhanced yield-related trait, e.g. nitrogen use efficiency and/or increased biomass production Since the lines were preselected for single insertion loci and a homozygous situation of the resistance marker, the disruption (or mutation) of single genes through the integration of the T-DNA were expected to have lead to the stress-resistant phenotype. Lines which showed a consistent phenotype were chosen for molecular analysis.

[1083] Genomic DNA was purified from approximately 100 mg of leaf tissue from these lines using standard procedures (either spins columns from Qiagen, Hilden, Germany or the Nucleon Phytopure Kit from Amersham Biosciences, Freiburg, Germany). The amplification of the insertion side of the T-DNA was achieved using two different methods. Either by an adaptor PCR-method according to Spertini D, Beliveau C. and Bellemare G., Biotechniques 27, 308 (1999) using T-DNA specific primers

### LB1 (5′-TGA CGC CAT TTC GCC TTT TCA-3′; SEQ ID NO: 4) or RB 1-2 (5′-CAA CTT AAT CGC CTT GCA GCA CA-3′; SEQ ID NO: 5)

[1084] for the first and

### LB2 (5′-CAG AAA TGG ATA AAT AGC CTT GCT TCC-3′; SEQ ID NO: 6) or

### RB4-2 (5′-AGC TGG CGT AAT AGC GAA GAG-3′; SEQ ID NO: 7)

[1085] for the second PCR respectively.

[1086] Alternatively TAIL-PCR (Liu Y-G., Mitsukawa N., Oosumi T. and Whittier R. F., Plant J. 8, 457 (1995)) was performed. In this case for the first PCR

### LB1 (5′-TGA CGC CAT TTC GCC TTT TCA-3′, SEQ ID NO: 4) or RB1-2 (5′-CAA CTT AAT CGC CTT GCA GCA CA-3′; SEQ ID NO: 5),

[1087] for the second PCR

### LB2 (5′-CAG AAA TGG ATA AAT AGC CTT GCT TCC-3′; SEQ ID NO: 6) or RB4-2 (5′-AGC TGG CGT AAT AGC GAA GAG-3′, SEQ ID NO: 7)

[1088] and for the last PCR
LB3 (5′-CCA ATA CAT TAC ACT AGC ATC TG-3′; SEQ ID NO: 8) or RB5 (5′-AAT GCT AGA GCA GCT TGA-3′; SEQ ID NO: 9) were used as T-DNA specific primers for left or right T-DNA borders respectively.

[1089] Appropriate PCR-products were identified on agarose gels and purified using columns and standard procedures (Qiagen, Hilden, Germany). PCR-products were sequenced with additional T-DNA-specific primers located towards the borders relative to the primers used for amplification. For adaptor PCR products containing left border sequences primer

LBseq (5′-CAA TAC ATT ACA CTA GCA TCT G-3′; SEQ ID NO: 10) and for sequences containing right border sequences primer

### RBseq (5′-AGA GGC CCG CAC CGA TCG-3′; SEQ ID NO: 11)

[1090] were used for sequencing reactions. For TAIL PCR products containing left border sequences primer
LBseq2 (5′-CTA GCA TCT GAA TTT CAT AAC C-3′; SEQ ID NO: 12) and for PCR products containing right border sequences primer
RBseq2 (5′-GCT TGA GCT TGG ATC AGA TTG-3′; SEQ ID NO: 13) were used for sequencing reactions. The resulting sequences were taken for comparison with the available Arabidopsis genome sequence from Genbank using the blast algorithm (Altschul et al., J Mol Biol, 215,403 (1990)).

[1091] Further details on PCR products used to identify the genomic locus are given in Table VI below. Indicated are the identified annotated open reading frame in the Arabidopsis genome, the estimated size of the obtained PCR product (in base pairs), the T-DNA border (LB: left border, RB: right border) for which the amplification was achieved, the method which resulted in the indicated PCR product (explanation see text above), the respective restriction enzymes in case of adaptor PCR, and the degenerated primer in the case of TAIL PCR. Routinely degenerated primers

ADP2
(5′-NGT CGA SWG ANA WGA A-3′; SEQ ID NO: 14),
ADP3
(5′-WGTGNAGWANCANAGA-3′; SEQ ID NO: 15),
ADP5
(5′-STT GNT AST NCT NTG C-3′; SEQ ID NO: 16),
ADP6
(5′-AGWGNAGWANCANAGA-3′; SEQ ID NO: 17),
ADP8
(5′-NTGCGASWGANWAGAA-3′; SEQ ID NO: 18),
ADP9
(5′-NTG CGA SWG ANT AGA A-3′; SEQ ID NO: 19)
and
ADP11
(5′-SST GGS TAN ATW ATW CT-3′; SEQ ID NO: 20)
were used.

[1092] The identification of the insertion locus in each case was confirmed by a control PCR, using one of the above mentioned T-DNA-specific primers and a primer deduced from the identified genomic locus, near to the insertion side. The amplification of a PCR-product of the expected size from the insertion line using these two primers proved the disruption of the identified locus by the T-DNA integration.

[1093] Table VI: Details on PCR products used to identify the down-regulated gene in lines showing increased yield, in particular an increased yield-related trait, e.g. an increased nutrient use efficiency, such as an enhanced nitrogen use efficiency and/or increased tolerance to environmental stress and/or increased biomass production as compared to a corresponding, e.g. non-transformed, wild type plant. The down regulated gene is defined by its TAIR Locus (Locus).

TABLE VI
PCR-products

| | | | | Restriction enzyme |
|---|---|---|---|---|
| SEQ ID | Locus | Border | Method | or deg. primer |
| 27 | At1g74730 | RB | Adapter | Spel |
| 60 | At3g07670 | RB | TAIL | ADP8 |
| 94 | At3g63270 | LB | Adapter | Spel |
| 132 | At4g03080 | RB | Adapter | Munl |
| 171 | At5g65240 | LB | Adapter | Psp1406I/Bsp119I |

[1094] Column 1 refers to the SEQ ID NO. of the gene which has been knocked out, column 2 refers to the TAIR Locus of the knocked out gene (Locus), column 3 refers to the T-DNA border for which the PCR product was amplified, column 4 refers to the PCR method for amplification and column 5 refers to restriction enzyme of degenerate primer used in the PCR method (for detailed examplation to columns 4 and 5 see text above; APX means either primer AP2, primer AP5, primer AP6, primer AP9 or primer AP11).

[1095] Construction of antisense constructs for repression of the activity or expression of a gene, e.g. a gene comprising SEQ ID NO. 27

[1096] A fragment of SEQ ID NO: 27 is amplified by PCR. To enable cloning of the PCR product, restriction sites may be added to the primers used for the amplification. Alternatively recombination sites may be added to the primers to enable a recombination reaction. The PCR fragment can be either cloned or recombined into a binary vector, preferently under control of a strong constitutive, tissue or developmental specific promoters in a way, that the orientation to the direction of the gene can be opposite of the direction the gene has in its original genomic position.

[1097] The amplification of a fragment of a sequences indicated in a line of column 5 of table III, application no. 1, can be performed using those primers which are indicated in column 7, application no. 1, in the respective same line in the same table III, comprising the extensions 5′-ATACCCGGG-3′ (SEQ ID NO.: 21) or 5′-ATAGAGCTC-3′ (SEQ ID NO.: 22). The extensions 5′-ATACCCGGG-3_{— (SEQ ID NO.:} 21) or 5′-ATAGAGCTC (SEQ ID NO.: 22) contain the XmaI and SacI restriction enzyme recognition sides, respectively, for cloning purposes.

[1098] The Oligonucleotides are solved in water to give a concentration of 20 μM. The PCR reaction contains 5 μl Herculase buffer (Stratagene), 0.4 μl dNTPs (25 mM each) (Amersham), 0.5 μl of each primer, 0.5 μl Herculase (Stratagene), 0.5 μl gDNA and 42.6 μl water. The PCR can be performed on MJ-Cycler Tetrad (BioZym) with the following programm:

4 min 94° C., followed by 30 cycles of 1 min 94° C., 1 min 50° C., 2 min 72° C. followed by 10 min 72° C. and cooling to 25° C.

[1099] The PCR product can be purified using a Kit from Qiagen. The DNA can be subsequently digested with XmaI/SacI at 37° C. over night. The fragment can then be cloned into the vector 1bxPcUbicolic SEQ ID NO.: 2, which can be digested with XmaI/SacI.

[1100] Construction of RNAi constructs for repression of the activity or expression of a gene, e.g. of a gene comprising SEQ ID NO.27

[1101] A fragment of SEQ ID NO:27 can be amplified by PCR. To enable cloning of the PCR product, restriction sites may be added to the primers used for the amplification.

[1102] Alternatively recombination sites may be added to the primers to enable a recombination reaction. The PCR fragment can be either cloned or recombined into a binary vector, preferently under control of a strong constitutive, tissue or developmental specific promoters in a way, that the fragment can be introduced twice in the vector as an inverted repeat, the repeats separated by a DNA spacer.

[1103] The amplification of a fragment of a sequence indicated in a line of column 5 of table III can be performed using those primers which can be indicated in column 7 in the respective same line in the same table III comprising the extensions 5′-ATAGGTACC-3′ (SEQ ID NO: 23) or 5′-ATAGTCGAC-3′(SEQ ID NO: 24). The extensions 5′-ATAGGTACC-3′ (SEQ ID NO: 23) or 5′-ATAGTCGAC-3′(SEQ ID NO: 24) contain the Asp718 and SalI restriction enzyme recognition sides respectively for cloning purposes.

[1104] The oligonucleotides can be solved in water to give a concentration of 20 μM. The PCR reaction contains 5 μl Herculase buffer (Stratagene), 0.4 μl dNTPs (25 mM each) (Amersham), 0.5 μl of each primer, 0.5 μl Herculase (Stratagene), 0.5 μl gDNA and 42.6 μl water. The PCR can be performed on MJ-Cycler Tetrad (BioZym) with the following programm:

4 min 94° C., followed by 30 cycles of 1 min 94° C., 1 min 50° C., 2 min 72° C. followed by 10 min 72° C. and cooling to 25° C.

[1105] The PCR product can be purified using a Kit from Qiagen. The DNA can be subsequently digested with Asp718/SalI at 37° C. over night. The fragment can then be cloned into the vector 10× PcUbispacer SEQ ID NO: 3 which can be digested with Asp718 /SalI. The resulting construct can be digested with XhoI/BsrGI and the same Asp718/SalI digested PCR fragment can be ligated into this vector. Subsequently, the expression cassette giving rise to BASTA resistance can be ligated as XbaI fragment into this vector that can be opened with XbaI and dephosphorilized before.

[1106] Construction of Cosuppression constructs for repression of the activity or expression of a gene, e.g. of a gene comprising SEQ ID NO.: 27

[1107] A fragment of SEQ ID NO: 27 is amplified by PCR. To enable cloning of the PCR product, restriction sites may be added to the primers used for the amplification. Alternatively recombination sites may be added to the primers to enable a recombination reaction. The PCR fragment can be either cloned or recombined into a binary vector, preferently under control of a strong constitutive, tissue or developmental specific promoters in a way, that the orientation to the promoter can be identical to the direction the gen has in its original genomic position.

[1108] The amplification of the fragment of the sequences indicated in a line of column 5 of Table III can be performed using those primers, which can be indicated in column 7 of the respective same line in the same Table III, which comprises the extensions 5′-ATACCATGG-3′ (SEQ ID NO: 25) or 5′-ATATTAATTAA-3′ (SEQ ID NO: 26). The extensions 5′-ATACCATGG-3′ (SEQ ID NO: 25) or 5′-ATATTAATTAA-3′ (SEQ ID NO: 26), contain the NcoI and PacI restriction enzyme recognition sides respectively for cloning purposes.

[1109] The oligonucleotides can be solved in water to give a concentration of 20 μM. The PCR reaction contains 5 μl Herculase buffer (Stratagene), 0.4 μl dNTPs (25 mM each) (Amersham), 0.5 μl of each p, 0.5 μl Herculase (Stratagene), 0.5 μl gDNA and 42.6 μl water. The PCR can be performed on MJ-Cycler Tetrad (BioZym) with the following programm:

4 min 94° C., followed by 30 cycles of 1 min 94° C., 1 min 50° C., 2 min 72° C. followed by 10 min 72° C. and cooling to 25° C.

[1110] The PCR product can be purified using a Kit from Qiagen. The DNA can be subsequently digested with NcoI/PacI at 37° C. over night. The fragment can then be cloned into the vector 1bxPcUbicolic SEQ ID NO: 2 which can be digested with NcoI/PacI.

[1111] Reducing the activity or expression of a gene, e.g. of a gene comprising SEQ ID NO: 27by artificial transcription factors

[1112] A gene and its homologous ORFs in other species may also be down regulated by introducing a synthetic specific repressor. For this purpose, a gene for a chimeric zinc finger protein, which binds to a specific region in the regulatory or coding region of the genes of interests or its homologs in other species can be constructed. The artificial zinc finger protein comprises a specific DNA-binding domain consisting for example of zinc finger and optional an repression like the EAR domain (Hiratsu et al., Plant J. 34, 733 (2003); Dominant repression of target genes by chimeric repressors that include the EAR motif, a repression domain, in Arabidopsis.)

[1113] Expression of this chimeric repressor for example in plants then results in specific repression of the target gene or of its homologs in other plant species lead to increased metabolite production. The experimental details especially about the desing and construction of specific zinc finger domains may be carried out as described, or WO 01/52620 or Ordiz M. I., (Proc. Natl. Acad. Sci. USA, 99 (20), 13290 (2002)) or Guan (Proc. Natl. Acad. Sci. USA, 99 (20), 13296 (2002)).

[1114] Engineering ryegrass plants by repressing the activity or expression of a gene, e.g. of a gene homolog to a gene comprising SEQ ID NO: 27 in ryegrass

[1115] Seeds of several different ryegrass varieties can be used as explant sources for transformation, including the commercial variety Gunne available from Svalöf Weibull Seed Company or the variety Affinity. Seeds can be surface-sterilized sequentially with 1% Tween-20 for 1 minute, 100% bleach for 60 minutes, 3 rinses with 5 minutes each with de-ionized and distilled H₂O, and then germinated for 3-4 days on moist, sterile filter paper in the dark. Seedlings can be further sterilized for 1 minute with 1% Tween-20, 5 minutes with 75% bleach, and rinsed 3 times with dd H₂O, 5 min each.

[1116] Surface-sterilized seeds can be placed on the callus induction medium containing Murashige and Skoog basal salts and vitamins, 20 g/l sucrose, 150 mg/l asparagine, 500 mg/l casein hydrolysate, 3g/l Phytagel, 10 mg/l BAP, and 5 mg/l dicamba. Plates can be incubated in the dark at 25° C. for 4 weeks for seed germination and embryogenic callus induction.

[1117] After 4 weeks on the callus induction medium, the shoots and roots of the seedlings can be trimmed away, the callus can be transferred to fresh media, can be maintained in culture for another 4 weeks, and can be then transferred to MSO medium in light for 2 weeks. Several pieces of callus (11-17 weeks old) are either strained through a 10 mesh sieve and put onto callus induction medium, or are cultured in 100 ml of liquid ryegrass callus induction media (same medium as for callus induction with agar) in a 250 ml flask. The flask can be wrapped in foil and shaken at 175 rpm in the dark at 23° C. for 1 week. Sieving the liquid culture with a 40-mesh sieve can be collected the cells.

[1118] The fraction collected on the sieve can be plated and can be cultured on solid ryegrass callus induction medium for 1 week in the dark at 25° C. The callus can be then transferred to and can be cultured on MS medium containing 1% sucrose for 2 weeks.

[1119] Transformation can be accomplished with either Agrobacterium or with particle bombardment methods. An expression vector can be created containing a constitutive or otherwise appropriate plant promoter and the antisense, RNAi, snRNA, dsRNA, siRNA, miRNA, ta-siRNA, cosuppression construct, recombination construct or ribozyme molecule, or the viral nucleic acid molecule, nucleic acid construct in a pUC vector. The plasmid DNA can be prepared from E. coli cells using with Qiagen kit according to manufacturer's instruction. Approximately 2 g of embryogenic callus can be spread in the center of a sterile filter paper in a Petri dish. An aliquot of liquid MSO with 10 g/l sucrose can be added to the filter paper. Gold particles (1.0 μm in size) are coated with plasmid DNA according to method of Sanford et al., 1993 and are delivered to the embryogenic callus with the following parameters: 500 μg particles and 2 μg DNA per shot, 1300 psi and a target distance of 8.5 cm from stopping plate to plate of callus and 1 shot per plate of callus.

[1120] After the bombardment, calli are transferred back to the fresh callus development medium and maintained in the dark at room temperature for a 1-week period. The callus can be then transferred to growth conditions in the light at 25° C. to initiate embryo differentiation with the appropriate selection agent, e.g. 250 nM Arsenal, 5 mg/l PPT or 50 mg/L Kanamycin. Shoots resistant to the selection agent are appearing and once rooted are transferred to soil.

[1121] Samples of the primary transgenic plants (TO) are analyzed by PCR to confirm the presence of T-DNA. These results are confirmed by Southern hybridization in which DNA can be electrophoresed on a 1% agarose gel and transferred to a positively charged nylon membrane (Roche Diagnostics). The PCR DIG Probe Synthesis Kit (Roche Diagnostics) can be used to prepare a digoxigenin-labelled probe by PCR, and used as recommended by the manufacturer. Furthermore the primary transgenic plants (TO) are analyzed for repressed expression of the gene to be repressed by standard methods such as Northern blots or quantitative RTPCR.

[1122] Transgenic T0 ryegrass plants are propagated vegetatively by excising tillers. The transplanted tillers are maintained in the greenhouse for 2 months until well established. The shoots are defoliated and allowed to grow for 2 weeks.

[1123] Engineering soybean plants by repressing the activity or expression of a gene, e.g. of a gene homolog to a gene comprising SEQ ID NO: 27 in soybean

[1124] Soybean can be transformed according to the following modification of the method described in the Texas A&M U.S. Pat. No. 5,164,310. Several commercial soybean varieties can be amenable to transformation by this method. The cultivar Jack (available from the Illinois Seed Foundation) can be commonly used for transformation. Seeds can be sterilized by immersion in 70% (v/v) ethanol for 6 min and in 25% commercial bleach (NaOCl) supplemented with 0.1% (v/v) Tween for 20 min, followed by rinsing 4 times with sterile double distilled water. Removing the radicle, hypocotyl and one cotyledon from each seedling propagates seven-day seedlings. Then, the epicotyl with one cotyledon can be transferred to fresh germination media in petri dishes and incubated at 25° C. under a 16 h photoperiod (approx. 100 βE/m²s) for three weeks. Axillary nodes (approx. 4 mm in length) can be cut from 3 to 4 week-old plants. Axillary nodes can be excised and incubated in Agrobacterium LBA4404 culture.

[1125] Many different binary vector systems have been described for plant trans-formation (e.g. An G., in Agrobacterium Protocols. Methods in Molecular Biology vol 44, pp 47-62, Gartland K M A and M R Davey eds. Humana Press, Totowa, N.J.). Many can be based on the vector pBIN19 described by Bevan (Nucleic Acid Research. 12,8711 (1984)) that includes a plant gene expression cassette flanked by the left and right border sequences from the Ti plasmid of Agrobacterium tumefaciens. A plant gene expression cassette consists of at least two genes—a selection marker gene and a plant promoter regulating the transcription of the antisense, RNAi, snRNA, dsRNA, siRNA, miRNA, ta-siRNA, cosuppression construct, or ribozyme molecule, or the viral nucleic acid molecule. Various selection marker genes can be used as described above, including the Arabidopsis gene encoding a mutated acetohydroxy acid synthase (AHAS) enzyme (U.S. Pat. Nos. 5,767,366 and 6,225,105). Similarly, various promoters can be used to regulate the repression cassette to provide constitutive, developmental, tissue or environmental repression of gene transcription as described above. In this example, the 34S promoter (GenBank Accession numbers M59930 and X16673) can be used to provide constitutive repression of the repression cassette.

[1126] After the co-cultivation treatment, the explants can be washed and transferred to selection media supplemented with 500 mg/L timentin. Shoots can be excised and placed on a shoot elongation medium. Shoots longer than 1 cm can be placed on rooting medium for two to four weeks prior to transplanting to soil.

[1127] The primary transgenic plants (T0) can be analyzed by PCR to confirm the presence of T-DNA. These results can be confirmed by Southern hybridization in which DNA can be electrophoresed on a 1% agarose gel and transferred to a positively charged nylon membrane (Roche Diagnostics). The PCR DIG Probe Synthesis Kit (Roche Diagnostics) can be used to prepare a digoxigenin-labelled probe by PCR, and can be used as recommended by the manufacturer. Furthermore the primary transgenic plants (T0) can be analyzed for repressed expression of the gene to be repressed by standard methods such as Northern blots or quantitative RTPCR.

[1128] Engineering corn plants by repressing the activity or expression of a gene, e.g. of a gene homolog to a gene comprising SEQ ID NO: 27 in corn

[1129] Transformation of maize (Zea Mays L.) can be performed with a modification of the method described by Ishida et al. (Nature Biotech 14745 (1996)).

[1130] Transformation can be genotype-dependent in corn and only specific genotypes can be amenable to transformation and regeneration. The inbred line A188 (University of Minnesota) or hybrids with A188 as a parent can be good sources of donor material for transformation (Fromm et al., Biotech 8, 833 (1990)), but other genotypes can be used successfully as well. Ears can be harvested from corn plants at approximately 11 days after pollination (DAP) when the length of immature embryos can be about 1 to 1.2 mm. Immature embryos can be cocultivated with Agrobacterium tumefaciens that carry “super binary” vectors and transgenic plants can be recovered through organogenesis. The super binary vector system of Japan Tobacco can be described in WO patents WO94/00977 and WO95/06722. Vectors can be constructed as described. Various selection marker genes can be used including the maize gene encoding a mutated acetohydroxy acid synthase (AHAS) enzyme (U.S. Pat. No. 6,025,541). Similarly, various promoters can be used to regulate the repression cassette to provide constitutive, developmental, tissue or environmental expression of the antisense, RNAi, snRNA, dsRNA, siRNA, miRNA, ta-siRNA, cosuppression construct, or ribozyme molecule, or the viral nucleic acid molecule. In this example, the 34S promoter (GenBank Accession numbers M59930 and X16673) can be used to provide constitutive expression of the repression cassette.

[1131] Excised embryos can be grown on callus induction medium, then maize regeneration medium, containing imidazolinone as a selection agent. The Petri plates can be incubated in the light at 25° C. for 2 to 3 weeks, or until shoots develop. The green shoots can be transferred from each embryo to maize rooting medium and incubated at 25° C. for 2 to 3 weeks, until roots develop. The rooted shoots can be transplanted to soil in the greenhouse. T1 seeds can be produced from plants that exhibit tolerance to the imidazolinone herbicides and which show repressed expression of the gene to be repressed. Such analysis can be done by standard methods such as Northern blots or quantitative RTPCR.

[1132] The T1 generation of single locus insertions of the T-DNA can segregate for the transgene in a 3:1 ratio. Those progeny containing one or two copies of the trans-gene can be tolerant of the imidazolinone herbicide. Homozygous T2 plants can exhibit similar phenotypes as the T1 plants. Hybrid plants (F1 progeny) of homozygous transgenic plants and non-transgenic plants can also exhibited increased similar phenotypes.

[1133] Engineering wheat plants by repressing the activity or expression of a gene, e.g. of a gene homolog to a gene comprising SEQ ID NO: 27 in wheat

[1134] Transformation of wheat can be performed with the method described by Ishida et al. (Nature Biotech. 14745 (1996)). The cultivar Bobwhite (available from CYMMIT, Mexico) can be commonly used in transformation. Immature embryos can be cocultivated with Agrobacterium tumefaciens that carry “super binary” vectors, and transgenic plants can be recovered through organogenesis. The super binary vector system of Japan Tobacco can be described in WO patents WO94/00977 and WO95/06722. Vectors were constructed as described. Various selection marker genes can be used including the maize gene encoding a mutated acetohydroxy acid synthase (AHAS) enzyme (U.S. Pat. No. 6,025,541). Similarly, various promoters can be used to regulate the repression cassette to provide constitutive, developmental, tissue or environmental regulation of the antisense, RNAi, snRNA, dsRNA, siRNA, miRNA, ta-siRNA, cosuppression construct, ribozyme molecule, or the viral nucleic acid molecule. In this example, the 34S promoter (GenBank Accession numbers M59930 and X16673) can be used to provide constitutive expression of the repression cassette.

[1135] After incubation with Agrobacterium, the embryos can be grown on callus induction medium, then regeneration medium, containing imidazolinone as a selection agent. The Petri plates can be incubated in the light at 25° C. for 2 to 3 weeks, or until shoots develop. The green shoots can be transferred from each embryo to rooting medium and incubated at 25° C. for 2 to 3 weeks, until roots develop. The rooted shoots can be trans-planted to soil in the greenhouse. T1 seeds can be produced from plants that exhibit tolerance to the imidazolinone herbicides and which show repressed expression of the gene to be repressed. Such analysis can be done by standard methods such as Northern blots or quantitative RTPCR.

[1136] The T1 generation of single locus insertions of the T-DNA can segregate for the transgene in a 3:1 ratio. Those progeny containing one or two copies of the trans-gene can be tolerant of the imidazolinone herbicide. Homozygous T2 plants exhibited similar phenotypes.

[1137] Engineering Rapeseed/Canola plants by repressing the activity or expression of a gene, e.g. of a gene homolog to a gene comprising SEQ ID NO: 27 in rapeseed/canola plants

[1138] Cotyledonary petioles and hypocotyls of 5-6 day-old young seedlings can be used as explants for tissue culture and transformed according to Babic et al. (Plant Cell Rep 17, 183 (1998)). The commercial cultivar Westar (Agriculture Canada) can be the standard variety used for transformation, but other varieties can be used.

[1139] Agrobacterium tumefaciens LBA4404 containing a binary vector can be used for canola transformation. Many different binary vector systems have been described for plant transformation e.g. An G., in Agrobacterium Protocols. Methods in Molecular Biology Vol 44, pp 47-62, Gartland K. M. A. and Davey M. R. eds. Humana Press, Totowa, N.J.). Many can be based on the vector pBIN19 described by Bevan (Nucleic Acid Research. 12, 8711 (1984)) that includes a plant gene expression cassette flanked by the left and right border sequences from the Ti plasmid of Agrobacterium tumefaciens. A plant gene expression cassette consists of at least two genes—a selection marker gene and a plant promoter regulating the transcription of the repression cassette of the trait gene. Various selection marker genes can be used including the Arabidopsis gene encoding a mutated acetohydroxy acid synthase (AHAS) enzyme (U.S. Pat. Nos. 5,7673,666 and 6,225,105). Similarly, various promoters can be used to regulate the repression cassette to provide constitutive, developmental, tissue or environmental regulation of the antisense, RNAi, snRNA, dsRNA, siRNA, miRNA, ta-siRNA, cosuppression construct, ribozyme molecule, or the viral nucleic acid molecule. In this example, the 34S promoter (GenBank Accession numbers M59930 and X16673) can be used to provide constitutive expression of the repression cassette.

[1140] Canola seeds can be surface-sterilized in 70% ethanol for 2 min., and then in 30% Clorox with a drop of Tween-20 for 10 min, followed by three rinses with sterilized distilled water. Seeds can be then germinated in vitro 5 days on half strength MS medium without hormones, 1% sucrose, 0.7% Phytagar at 23° C., 16 h light. The cotyledon petiole explants with the cotyledon attached can be excised from the in vitro seedlings, and can be inoculated with Agrobacterium by dipping the cut end of the petiole explant into the bacterial suspension. The explants can be then cultured for 2 days on MSBAP-3 medium containing 3 mg/l BAP, 3% sucrose, 0.7% Phytagar at 23° C., 16 h light. After two days of co-cultivation with Agrobacterium, the petiole explants can be transferred to MSBAP-3 medium containing 3 mg/l BAP, cefotaxime, carbenicillin, or timentin (300 mg/l) for 7 days, and then cultured on MSBAP-3 medium with cefotaxime, carbenicillin, or timentin and selection agent until shoot regeneration. When the shoots can be 5 to 10 mm in length, they can be cut and transferred to shoot elongation medium (MSBAP-0.5, containing 0.5 mg/l BAP). Shoots of about 2 cm in length can be transferred to the rooting medium (MSO) for root induction.

[1141] Samples of the primary transgenic plants (T0) can be analyzed by PCR to confirm the presence of T-DNA. These results can be confirmed by Southern hybridization in which DNA can be electrophoresed on a 1% agarose gel and can be transferred to a positively charged nylon membrane (Roche Diagnostics). The PCR DIG Probe Synthesis Kit (Roche Diagnostics) can be used to prepare a digoxigenin-labelled probe by PCR, and used as recommended by the manufacturer. Furthermore the primary transgenic plants (T0) can be analyzed for repressed expression of the gene to be repressed by standard methods such as Northern blots or quantitative RTPCR.

[1142] Engineering alfalfa plants by repressing the activity or expression of a gene, e.g. of a gene homolog to a gene comprising SEQ ID NO: 27 in alfalfa

[1143] A regenerating clone of alfalfa (Medicago sativa) can be transformed using the method of McKersie et al., Plant Physiol 119, 839 (1999). Regeneration and transformation of alfalfa can be genotype dependent and therefore a regenerating plant can be required. Methods to obtain regenerating plants have been described. For example, these can be selected from the cultivar Rangelander (Agriculture Canada) or any other commercial alfalfa variety as described by Brown D. C. W. and Atanassov A. (Plant Cell Tissue Organ Culture 4, 111 (1985)). Alternatively, the RA3 variety (University of Wisconsin) has been selected for use in tissue culture (Walker et al., Am J Bot 65, 654 (1978)).

[1144] Petiole explants can be cocultivated with an overnight culture of Agrobacterium tumefaciens C58C1 pMP90 (McKersie et al., Plant Physiol 119, 839 (1999)) or LBA4404 containing a binary vector. Many different binary vector systems have been described for plant transformation (e.g. An G., in Agrobacterium Protocols. Methods in Molecular Biology vol 44, pp 47-62, Gartland K M A and M R Davey eds. Humana Press, Totowa, N.J.). Many can be based on the vector pBIN19 described by Bevan (Nucleic Acid Research. 12, 8711 (1984)) that includes a plant gene expression cassette flanked by the left and right border sequences from the Ti plasmid of Agrobacterium tumefaciens. A plant gene expression cassette consists of at least two genes—a selection marker gene and a plant promoter regulating the transcription of the antisense, RNAi, snRNA, dsRNA, siRNA, miRNA, ta-siRNA, cosuppression construct, ribozyme molecule, or the viral nucleic acid molecule. Various selection marker genes can be used including the Arabidopsis gene encoding a mutated acetohydroxy acid synthase (AHAS) enzyme (U.S. Pat. Nos. 5,7673,666 and 6,225,105). Similarly, various promoters can be used to regulate the repression cassette that provides constitutive, developmental, tissue or environmental regulation of gene repression. In this example, the 34S promoter (GenBank Accession numbers M59930 and X16673) can be used to provide constitutive expression of the repression cassette.

[1145] The explants can be cocultivated for 3 d in the dark on SH induction medium containing 288 mg/l Pro, 53 mg/l thioproline, 4.35 g/l K₂SO₄, and 100 μm acetosyringinone. The explants can be washed in half-strength Murashige-Skoog medium (Murashige and Skoog, 1962) and plated on the same SH induction medium without acetosyringinone but with a suitable selection agent and suitable antibiotic to inhibit Agrobacterium growth. After several weeks, somatic embryos can be transferred to BOi2Y development medium containing no growth regulators, no antibiotics, and 50 g/l sucrose. Somatic embryos can be subsequently germinated on half-strength Murashige-Skoog medium. Rooted seedlings can be transplanted into pots and grown in a greenhouse.

[1146] The T0 transgenic plants can be propagated by node cuttings and rooted in Turface growth medium. The plants can be defoliated and grown to a height of about 10 cm (approximately 2 weeks after defoliation). Furthermore the primary transgenic plants (T0) can be analyzed for repressed expression of the gene to be repressed by standard methods such as Northern blots or quantitative RTPCR.

[1147] Tolerant plants according to [0411.1.1.1] (ryegrass plants), [0419.1.1.1] (soybean plants), [0424.1.1.1] (corn plants), [0428.1.1.1] (wheat plants), [0432.1.1.1] (rapeseed/canola) or [0437.1.1.1] (alfalfa plants) show an enhanced yield, in particular of an yield-related trait, e.g. nitrogen use efficiency and/or biomass production.

[1148] Knock out of a gene by homologous recombination, e.g. of a gene comprising the sequence shown in SEQ ID NO: 27

[1149] Identifying Mutations in the Gene in Random Mutagenized Populations:

[1150] a) In Chemically or Radiation Mutated Population

[1151] Production of chemically or radiation mutated populations can be a common technique and known to the skilled worker. Methods can be described by Koorneef et al. 1982 and the citations therein and by Lightner and Caspar in “Methods in Molecular Biology” Vol 82. These techniques usually induce point mutations that can be identified in any known gene using methods such as TILLING (Colbert et al. 2001).

[1152] b) In T-DNA or Transposon Mutated Population by Reserve Genetics

[1153] Reverse genetic strategies to identify insertion mutants in genes of interest have been described for various cases eg. Krysan et al. (Plant Cell 11, 2283 (1999)); Sessions et al. (Plant Cell 14, 2985 (2002)); Young et al. (Plant Physiol. 125, 513 (2001)); Koprek et al. (Plant J. 24, 253 (2000)); Jeon et al. (Plant J. 22, 561 (2000)); Tissier et al. (Plant Cell 11, 1841 (1999)); Speulmann et al. (Plant Cell 11, 1853 (1999)). Briefly material from all plants of a large T-DNA or transposon mutagenized plant population can be harvested and genomic DNA prepared. Then the genomic DNA can be pooled following specific architectures as described for example in Krysan et al. (Plant Cell 11, 2283 (1999)). Pools of genomics DNAs can be then screened by specific multiplex PCR reactions detecting the combination of the insertional mutagen (eg T-DNA or Transposon) and the gene of interest. Therefore PCR reactions can be run on the DNA pools with specific combinations of T-DNA or transposon border primers and gene specific primers. General rules for primer design can again be taken from Krysan et al. (Plant Cell 11, 2283 (1999)) Rescreening of lower levels DNA pools lead to the identification of individual plants in which the gene of interest can be disrupted by the insertional mutagen.

### EQUIVALENTS

[1154] Those of ordinary skill in the art will recognize, or will be able to ascertain using no more than routine experimentation, many equivalents to the specific embodiments of the invention described herein. Such equivalents can be intended to be encompassed by the following claims.

### FIGURES

TABLE IA
Nucleic acid sequence ID numbers

| | | | | | 5. | | |
|---|---|---|---|---|---|---|---|
| | | | | | Lead | | |
| | 1. | 2. | 3. | 4. | SEQ | 6. | 7. |
| Application | Hit | Project | Locus | Organism | ID | — | SEQ IDs of Nucleic Acid Homologs |
| 1 | 1 | NUE_KO_1 | At1g74730 | A. th. | 27 | — | 29, 31, 33, 35 |
| 1 | 2 | NUE_KO_1 | At3g07670 | A. th. | 60 | — | 62, 64, 66, 68, 70, 331 |
| 1 | 3 | NUE_KO_1 | At3g63270 | A. th. | 94 | — | 96, 98, 100, 102, 104, 106, 108, 335, 337, 339, 341, 343 |
| 1 | 4 | NUE_KO_1 | At4g03080 | A. th. | 132 | — | 134, 136, 138, 140, 142, 144, 146, 347, 349, 351, 353, 355, 357, 359, 361 |
| 1 | 5 | NUE_KO_1 | At5g65240 | A. th. | 171 | — | 173, 175, 177, 179, 181, 183, 185, 187, 189, 191, 193, 195, 197, 199, 201, |
| | | | | | | | 203, 205, 207, 209, 211, 213, 215, 217, 219, 221, 223, 225, 227, 229, 231, |
| | | | | | | | 233, 235, 237, 239, 241, 243, 245, 247, 249, 251, 253, 255, 257, 259, 261, |
| | | | | | | | 263, 265, 267, 365, 367, 369, 371, 373, 375, 377, 379 |

TABLE IB
Nucleic acid sequence ID numbers

| | | | | | 5. | | |
|---|---|---|---|---|---|---|---|
| | 1. | 2. | 3. | 4. | Lead SEQ | | 7. |
| Application | Hit | Project | Locus | Organism | ID | 6. | SEQ IDs of Nucleic Acid Homologs |
| 1 | 1 | NUE_KO_1 | At1g74730 | A. th. | 27 | | 37, 39, 41, 43, 45, 47 |
| 1 | 2 | NUE_KO_1 | At3g07670 | A. th. | 60 | | 72, 74 |
| 1 | 3 | NUE_KO_1 | At3g63270 | A. th. | 94 | | 110, 112, 114 |
| 1 | 4 | NUE_KO_1 | At4g03080 | A. th. | 132 | | 148 |
| 1 | 5 | NUE_KO_1 | At5g65240 | A. th. | 171 | | 269, 271, 273, 275, 277, 279, 281, 283, 285, 287, 289, 291, 293, 295, |
| | | | | | | | 297, 299, 301, 303, 305, 307, 309, 311 |

TABLE IIA
Amino acid sequence ID numbers

| | | | | | 5. | | |
|---|---|---|---|---|---|---|---|
| | 1. | 2. | 3. | 4. | Lead SEQ | 6. | 7. |
| Application | Hit | Project | Locus | Organism | ID | — | SEQ IDs of Polypeptide Homologs |
| 1 | 1 | NUE_KO_1 | At1g74730 | A. th. | 28 | — | 30, 32, 34, 36 |
| 1 | 2 | NUE_KO_1 | At3g07670 | A. th. | 61 | — | 63, 65, 67, 69, 71, 332 |
| 1 | 3 | NUE_KO_1 | At3g63270 | A. th. | 95 | — | 97, 99, 101, 103, 105, 107, 109, 336, 338, 340, 342, 344 |
| 1 | 4 | NUE_KO_1 | At4g03080 | A. th. | 133 | — | 135, 137, 139, 141, 143, 145, 147, 348, 350, 352, 354, 356, 358, 360, |
| | | | | | | | 362 |
| 1 | 5 | NUE_KO_1 | At5g65240 | A. th. | 172 | — | 174, 176, 178, 180, 182, 184, 186, 188, 190, 192, 194, 196, 198, 200, |
| | | | | | | | 202, 204, 206, 208, 210, 212, 214, 216, 218, 220, 222, 224, 226, 228, |
| | | | | | | | 230, 232, 234, 236, 238, 240, 242, 244, 246, 248, 250, 252, 254, 256, |
| | | | | | | | 258, 260, 262, 264, 266, 268, 366, 368, 370, 372, 374, 376, 378, 380 |

TABLE IIB
Amino acid sequence ID numbers

| | | | | | 5. | | |
|---|---|---|---|---|---|---|---|
| | 1. | 2. | 3. | 4. | Lead SEQ | 6. | 7. |
| Application | Hit | Project | Locus | Organism | ID | — | SEQ IDs of Polypeptide Homologs |
| 1 | 1 | NUE_KO_1 | At1g74730 | A. th. | 28 | — | 38, 40, 42, 44, 46, 48 |
| 1 | 2 | NUE_KO_1 | At3g07670 | A. th. | 61 | — | 73, 75 |
| 1 | 3 | NUE_KO_1 | At3g63270 | A. th. | 95 | — | 111, 113, 115 |
| 1 | 4 | NUE_KO_1 | At4g03080 | A. th. | 133 | — | 149 |
| 1 | 5 | NUE_KO_1 | At5g65240 | A. th. | 172 | — | 270, 272, 274, 276, 278, 280, 282, 284, 286, 288, 290, 292, 294, 296, |
| | | | | | | | 298, 300, 302, 304, 306, 308, 310, 312 |

TABLE III
Primer nucleic acid sequence ID numbers

| | 1. | 2. | 3. | 4. | 5. | 6. | 7. |
|---|---|---|---|---|---|---|---|
| Application | Hit | Project | Locus | Organism | Lead SEQ ID | — | SEQ IDs of Primers |
| 1 | 1 | NUE_KO_1 | At1g74730 | A. th. | 27 | — | 49, 50, 51, 52, 53, 54, 55, 56 |
| 1 | 2 | NUE_KO_1 | At3g07670 | A. th. | 60 | — | 76, 77, 78, 79, 80, 81, 82, 83 |
| 1 | 3 | NUE_KO_1 | At3g63270 | A. th. | 94 | — | 116, 117, 118, 119, 120, 121, 122, 123 |
| 1 | 4 | NUE_KO_1 | At4g03080 | A. th. | 132 | — | 150, 151, 152, 153, 154, 155, 156, 157 |
| 1 | 5 | NUE_KO_1 | At5g65240 | A. th. | 171 | — | 313, 314, 315, 316, 317, 318, 319, 320 |

TABLE IV
Consensus amino acid sequence ID numbers

| | 1. | 2. | 3. | 4. | 5. | 6. | 7. |
|---|---|---|---|---|---|---|---|
| Application | Hit | Project | Locus | Organism | Lead SEQ ID | — | SEQ IDs of Consensus/Pattern Sequences |
| 1 | 1 | NUE_KO_1 | At1g74730 | A. th. | 28 | — | 57, 58, 59 |
| 1 | 2 | NUE_KO_1 | At3g07670 | A. th. | 61 | — | 84, 85, 86, 87, 88, 89, 90, 91, 92, 93 |
| 1 | 3 | NUE_KO_1 | At3g63270 | A. th. | 95 | — | 124, 125, 126, 127, 128, 129, 130, 131 |
| 1 | 4 | NUE_KO_1 | At4g03080 | A. th. | 133 | — | 158, 159, 160, 161, 162, 163, 164, 165, |
| | | | | | | | 166, 167, 168, 169, 170 |
| 1 | 5 | NUE_KO_1 | At5g65240 | A. th. | 172 | — | 321, 322, 323, 324, 325, 326, 327, 328 |

1. A method for increasing the yield of a plant as compared to a corresponding wild type plant, which comprises reducing of one or more activities selected from the group consisting of At1g74730-protein, At3g63270-protein, protein kinase, protein serine/threonine phosphatase, and SET domain-containing protein, in the plant or a part thereof.

2. A method for producing a transgenic plant cell, a plant or a part thereof with enhanced yield as compared to a corresponding non-transformed wild type plant cell, plant or part thereof, which comprises the following steps:
(a) reducing, repressing or deleting of one or more activities selected from the group consisting of At1g74730-protein, At3g63270-protein, protein kinase, protein serine/threonine phosphatase, and SET domain-containing protein, in a plant cell, a plant or a part thereof; and
(b) generating a transformed plant cell, plant or a part thereof with enhanced NUE and/or increased biomass production as compared to a corresponding non-transformed wild type plant cell, plant or part thereof and growing under conditions which permit the development of the plant cell, plant or part thereof.

3. A method for producing a transgenic plant cell, plant or a part thereof with enhanced yield as compared to a corresponding non-transformed wild type plant, which comprises the following steps:
(a) reducing, repressing or deleting the activity of
(i) a polypeptide comprising a polypeptide, a consensus sequence or at least one polypeptide motif as depicted in column 5 or 7 of table II or of table IV, respectively; or
(ii) an expression product of a nucleic acid molecule comprising a polynucleotide as depicted in column 5 or 7 of table I,
(iii) or a functional equivalent of (i) or (ii); in a plant cell, a plant or a part thereof, and
(b) generating a transformed plant with enhanced NUE and/or increased biomass production as compared to a corresponding non-transformed wild type plant cell, plant or part thereof and growing under conditions which permit the development of the plant.

4. The method as claimed in claim 1, comprising reducing, decreasing or deleting the expression or activity of at least one nucleic acid molecule having or encoding the activity of at least one nucleic acid molecule represented by the nucleic acid molecule as depicted in column 5 of table I, and comprising a nucleic acid molecule which is selected from the group consisting of:
(a) a nucleic acid molecule encoding the polypeptide shown in column 5 or 7 of table II;
(b) a nucleic acid molecule shown in column 5 or 7 of table I;
(c) a nucleic acid molecule, which, as a result of the degeneracy of the genetic code, can be derived from a polypeptide sequence depicted in column 5 or 7 of table II;
(d) a nucleic acid molecule having at least 30% identity with the nucleic acid molecule sequence of a polynucleotide comprising the nucleic acid molecule shown in column 5 or 7 of table I;
(e) a nucleic acid molecule encoding a polypeptide having at least 30% identity with the amino acid sequence of the polypeptide encoded by the nucleic acid molecule of (a) to (c) and having the activity represented by a nucleic acid molecule comprising a polynucleotide as depicted in column 5 of table I;
(f) a nucleic acid molecule encoding a polypeptide which can be isolated with the aid of monoclonal or polyclonal antibodies made against a polypeptide encoded by one of the nucleic acid molecules of (a) to (e) and having the activity represented by the nucleic acid molecule comprising a polynucleotide as depicted in column 5 of table I;
(g) a nucleic acid molecule encoding a polypeptide comprising the consensus sequence or one or more polypeptide motifs as shown in column 7 of table IV and preferably having the activity represented by a nucleic acid molecule comprising a polynucleotide as depicted in column 5 of table II or IV;
(h) a nucleic acid molecule encoding a polypeptide having the activity represented by a protein as depicted in column 5 of table II;
(i) nucleic acid molecule which comprises a polynucleotide, which is obtained by amplifying a cDNA library or a genomic library using the primers in column 7 of table III which do not start at their 5′-end with the nucleotides ATA and having the activity represented by a nucleic acid molecule comprising a polynucleotide as depicted in column 5 of table II or IV;
(j) nucleic acid molecule encoding a polypeptide, the polypeptide being derived by substituting, deleting and/or adding one or more amino acids of the amino acid sequence of the polypeptide encoded by the nucleic acid molecules (a) to (d); and
(k) a nucleic acid molecule which is obtainable by screening a suitable nucleic acid library under stringent hybridization conditions with a probe comprising a complementary sequence of a nucleic acid molecule of (a) or (b) or with a fragment thereof, having at least 15 nt, preferably 20 nt, 30 nt, 50 nt, 100 nt, 200 nt or 500 nt of a nucleic acid molecule complementary to a nucleic acid molecule sequence characterized in (a) to (d) and encoding a polypeptide having the activity represented by a protein comprising a polypeptide as depicted in column 5 of Table II;
or which comprises a sequence which is complementary thereto;
or reducing, repressing, decreasing or deleting of a expression product of a nucleic acid molecule comprising a nucleic acid molecule as depicted in (a) to (k), a polypeptide comprising a polypeptide as shown in column 5 or 7 of table II; or of a protein encoded by said nucleic acid molecule.

5. The method of claim 3, comprising the reduction of the activity or expression of a polypeptide comprising a polypeptide encoded by the nucleic acid molecule characterized in claim 3 in a plant cell, a plant or a part thereof.

6. The method of claim 3, whereby the method comprises at least one step selected from the group consisting of:
(a) introducing of a nucleic acid molecule encoding a ribonucleic acid sequence, which is able to form a double-stranded ribonucleic acid molecule, whereby a fragment of at least 17 nt of said double-stranded ribonucleic acid molecule has a homology of at least 50% to a nucleic acid molecule selected from the group of
(i) the nucleic acid molecule as characterized in claim 3;
(ii) a nucleic acid molecule as depicted in column 5 or 7 of table I or encoding a polypeptide as depicted in column 5 or 7 of table II, and
(iii) a nucleic acid molecule encoding a polypeptide having the activity of polypeptide depicted in column 5 of table II or encoding the expression product of a polynucleotide comprising a nucleic acid molecule as depicted in column 5 or 7 of table I;
(b) introducing an RNAi, snRNA, dsRNA, siRNA, miRNA, ta-siRNA, cosuppression molecule, ribozyme, or antisense nucleic acid molecule, whereby the RNAi, snRNA, dsRNA, siRNA, miRNA, ta-siRNA, cosuppression molecule, ribozyme, or antisense nucleic acid molecule comprises a fragment of at least 17 nt with a homology of at least 50% to a nucleic acid molecule selected from a group defined in section (a) of this claim;
(c) introducing of a ribozyme which specifically cleaves a nucleic acid molecule selected from the group defined in section (a) of this claim;
(d) introducing of the RNAi, snRNA, dsRNA, siRNA, miRNA, ta-siRNA, cosuppression molecule, ribozyme, or antisense nucleic acid molecule characterized in (b) and the ribozyme characterized in (c);
(e) introducing of a sense nucleic acid molecule conferring the expression of a nucleic acid molecule comprising a nucleic acid molecule selected from the group defined in claim 3 or defined in section (a)(ii) or (a)(iii) of this claim or a nucleic acid molecule encoding a polypeptide having at least 50% identity with the amino acid sequence of the polypeptide encoded by the nucleic acid molecule of claim 3 (a) to (c) and having the activity represented by a protein comprising a polypeptide depicted in column 5 of table II for inducing a co-suppression of the endogenous expression product;
(f) introducing a nucleic acid molecule conferring the expression of a dominant-negative mutant of a protein having the activity of a protein as depicted in column 5 or 7 of table II or comprising a polypeptide being encoded by a nucleic acid molecule as characterized in claim 3;
(g) introducing a nucleic acid molecule encoding a factor, which binds to a nucleic acid molecule comprising a nucleic acid molecule selected from the group defined in claim 3 or defined in section (a)(ii) or (a)(iii) of this claim conferring the expression of a protein having the activity of a protein encoded by a nucleic acid molecule as characterized in claim 3;
(h) introducing a viral nucleic acid molecule conferring the decline of a RNA molecule comprising a nucleic acid molecule selected from the group defined in claim 3 or defined in section (a)(ii) or (a)(iii) of this claim conferring the expression of a protein encoded by a nucleic acid molecule as characterized in claim 3;
(i) introducing a nucleic acid construct capable to recombine with and silence, inactivate, repress or reduces the activity of an endogenous gene comprising a nucleic acid molecule selected from the group defined in claim 3 or defined in section (a)(ii) or (a)(iii) of this claim conferring the expression of a protein encoded by a nucleic acid molecule as characterized in claim 3;
(j) introducing a non-silent mutation in a endogenous gene comprising a nucleic acid molecule selected from the group defined in claim 3 or defined in section (a)(ii) or (a)(iii) of this claim; and
(k) introducing an expression construct conferring the expression of nucleic acid molecule characterized in any one of (a) to (i).

7. The method as claimed in claim 3, wherein a fragment of at least 17 by of a 3′- or 5′-nucleic acid sequence of a sequences comprising a nucleic acid molecule selected from the group defined in claim 3 or defined in section (a)(ii) or (a)(iii) of this claim with an identity of at least 50% is used for the reduction of the nucleic acid molecule characterized in claim 3 or the polypeptide encoded by said nucleic acid molecule.

8. The method as claimed in claim 1, wherein the plant is selected from the group consisting of Anacardiaceae, Asteraceae, Apiaceae, Betulaceae, Boraginaceae, Brassicaceae, Bromeliaceae, Caricaceae, Cannabaceae, Convolvulaceae, Chenopodiaceae, Cucurbitaceae, Elaeagnaceae, Ericaceae, Euphorbiaceae, Fabaceae, Geraniaceae, Gramineae, Juglandaceae, Lauraceae, Leguminosae, Linaceae, perennial grass, fodder crops, vegetables and ornamentals.

9. The method of claim 3, comprising the step, introduction of a RNAi, snRNA, dsRNA, siRNA, miRNA, ta-siRNA, cosuppression molecule, ribozyme, antibody and/or antisense nucleic that has been designed to target the expression product of a gene comprising the nucleic acid molecule as characterized in claim 3 to induce a breakdown of the mRNA of the said gene of interest and thereby silence the gene expression, or of an expression cassette ensuring the expression of the former.

10. An isolated nucleic acid molecule which comprises a nucleic acid molecule selected from the group consisting of:
(a) a nucleic acid molecule which encodes a polypeptide comprising the polypeptide shown in column 5 or 7 of table II B;
(b) a nucleic acid molecule which comprising a polynucleotide shown in column 5 or 7 of table I B;
(c) a nucleic acid molecule comprising a nucleic acid sequence, which, as a result of the degeneracy of the genetic code, can be derived from a polypeptide sequence depicted in column 5 or 7 of table II B and having the activity represented by the protein depicted in column 5 of table II;
(d) a nucleic acid molecule encoding a polypeptide having at least 50% identity with the amino acid sequence of a polypeptide encoded by the nucleic acid molecule of (a) or (c) and having the activity represented by the protein depicted in column 5 of table II;
(e) a nucleic acid molecule encoding a polypeptide, which is isolated with the aid of monoclonal antibodies against a polypeptide encoded by one of the nucleic acid molecules of (a) to (c) and having the activity represented by the protein depicted in column 5 of table II;
(f) a nucleic acid molecule encoding a polypeptide comprising the consensus sequence or a polypeptide motif shown in column 7 of table IV and having the biological activity represented by the protein depicted in column 5 of table II;
(g) a nucleic acid molecule encoding a polypeptide having the activity represented by a protein as depicted in column 5 of table II;
(h) a nucleic acid molecule which comprises a polynucleotide, which is obtained by amplifying a cDNA library or a genomic library using the primers in column 7 of table III which do not start at their 5′-end with the nucleotides ATA; and
(i) a nucleic acid molecule which is obtainable by screening a suitable library under stringent hybridization conditions with a probe comprising one of the sequences of the nucleic acid molecule of (a) to (c) or with a fragment of at least 17 nt of the nucleic acid molecule characterized in any one of (a) to (h) and encoding a polypeptide having the activity represented by the protein depicted in column 5 of table II;
or which comprises a sequence which is complementary thereto;
whereby the nucleic acid molecule according to (a) to (i) is at least in one or more nucleotides different from the sequence depicted in column 5 or 7 of table I A and preferably which encodes a protein which differs at least in one or more amino acids from the protein sequences depicted in column 5 or 7 of table II A.

11. A RNAi, snRNA, dsRNA, siRNA, miRNA, ta-siRNA, cosuppression molecule, ribozyme, antibody or antisense nucleic acid molecule for the reduction of the activity selected from the group consisting of At1g74730-protein, At3g63270-protein, protein kinase, protein serine/threonine phosphatase, and SET domain-containing protein, or of the activity or expression of a nucleic acid molecule as characterized in claim 10 or a polypeptide encoded by said nucleic acid molecule.

12. The RNAi, snRNA, dsRNA, siRNA, miRNA, ta-siRNA, cosuppression molecule, ribozyme, or antisense nucleic acid molecule of claim comprising a fragment of at least 17 nt of the nucleic acid molecule of claim 10.

13. A double-stranded RNA (dsRNA), RNAi, snRNA, siRNA, miRNA, antisense or ta-siRNA molecule or ribozyme, which is able to form a double-stranded ribonucleic acid molecule, whereby a fragment of at least 17 nt of said double-stranded ribonucleic acid molecule has a homology of at least 50% to a nucleic acid molecule selected from the group of
(i) a nucleic acid molecule as characterized in claim 3;
(ii) a nucleic acid molecule as depicted in column 5 or 7 of table I or encoding a polypeptide as depicted in column 5 or 7 of Table II, and
(iii) a nucleic acid molecule encoding a polypeptide having the activity of polypeptide depicted in column 5 or 7 of table II or encoding the expression product of a polynucleotide comprising a nucleic acid molecule as depicted in column 5 or 7 of table I.

14. The dsRNA molecule of claim 11, whereby the sense strand and the antisense strand are covalently bound to each other and the antisense strand is essentially the complement of the “sense”-RNA strand.

15. A viral nucleic acid molecule conferring the decline of an RNA molecule conferring the expression of a protein having the activity selected from the group consisting of At1g74730-protein, At3g63270-protein, protein kinase, protein serine/threonine phosphatase, and SET domain-containing protein, or of the activity or expression of the nucleic acid molecule as characterized in claim 10 or a polypeptide encoded by said nucleic acid molecule.

16. A tilling primer for the identification of a knock out of a gene comprising a nucleic acid sequence of a nucleic acid molecule as depicted in any one column 5 or 7 of table I.

17. A dominant-negative mutant of polypeptide comprising a polypeptide as shown in column 5 or 7 of table II.

18. A nucleic acid molecule encoding the dominant negative mutant of claim 17.

19. The tilling primer of claim 16 comprising a fragment of a nucleic acid sequence as depicted in column 5 or 7 of table I or complementary fragment thereof.

20. A nucleic acid construct conferring the expression of the RNAi, snRNA, dsRNA, siRNA, miRNA, ta-siRNA, cosuppression molecule, ribozyme, antibody or antisense nucleic acid molecule of claim 11.

21. A nucleic acid construct comprising an isolated nucleic acid molecule as claimed in claim 10, a RNAi, snRNA, dsRNA, siRNA, miRNA, ta-siRNA, cosuppression molecule, ribozyme, or antisense nucleic acid molecule for the reduction or expression of said isolated nucleic acid molecule, or a viral nucleic acid conferring the decline of an RNA molecule conferring the activity or expression of said isolated nucleic acid molecule, wherein the nucleic acid molecule is functionally linked to one or more regulatory signals.

22. A vector comprising the nucleic acid molecule claimed in claim 10, a RNAi, snRNA, dsRNA, siRNA, miRNA, ta-siRNA, cosuppression molecule, ribozyme, or antisense nucleic acid molecule for the reduction or expression of said isolated nucleic acid molecule, a viral nucleic acid conferring the decline of an RNA molecule conferring the activity or expression of said isolated nucleic acid molecule, or a nucleic acid construct comprising said nucleic acid molecule, said RNAi, snRNA, dsRNA, siRNA, miRNA, ta-siRNA, cosuppression molecule, ribozyme, or antisense nucleic acid molecule, or said viral nucleic acid.

23. The vector as claimed in claim 22, wherein the nucleic acid molecule is in operable linkage with regulatory sequences for the expression in a plant cell, a plant or a part thereof.

24. A transgenic plant cell, plant or a part thereof which has been transformed stably or transiently with the nucleic acid construct of claim 21 or a vector comprising said nucleic acid construct.

25. A transgenic plant cell, plant or a part thereof wherein the activity of a protein comprising a polypeptide, a consensus sequence or a polypeptide motif as depicted in column 5 or 7 of table II, table II B, or IV or a nucleic acid molecule comprising a nucleic acid molecule as depicted in column 5 or 7 of table I, preferably table I B, is reduced.

26. The transgenic plant cell, a plant or a part thereof of claim 24 derived from a monocotyledonous plant.

27. The transgenic plant cell, a plant or a part thereof of claim 24 derived from a dicotyledonous plant.

28. The transgenic plant cell, a plant or a part thereof of claim 24, wherein the plant is selected from the group consisting of maize (corn), wheat, rye, oat, triticale, rice, barley, soy, peanut, cotton, oil seed rape (including canola and winter oil seed rape), manihot, pepper, sunflower, flax, borage, safflower, linseed, primrose, rapeseed, turnip rape, tagetes, solanaceous plants, potato, tobacco, eggplant, tomato, Vicia species, pea, alfalfa, coffee, cacao, tea, Salix species, oil palm, coconut, perennial grass, forage crops and Arabidopsis thaliana.

29. The transgenic plant cell, a plant or a part thereof of claim 24, wherein the plant is selected from the group consisting of corn, soy, oilseed rape (including canola and winter oil seed rape), cotton, wheat and rice.

30. An isolated polypeptide encoded by the nucleic acid molecule as claimed in claim 10 or comprising the polypeptide as depicted in column 7 of table II B.

31. An antibody, which specifically binds to the polypeptide as claimed in claim 31.

32. A plant tissue, plant, harvested plant material or propagation material of a plant comprising the plant cell as claimed in claim 24 or 25.

33. A process for producing a polypeptide encoded by the nucleic acid sequence as claimed in claim 10, wherein the polypeptide is expressed in a host cell.

34. The transgenic plant cell, a plant or a part thereof of claim 24 that has an enhanced yield under conditions where nitrogen would be limiting for growth for a non-transformed wild-type plant cell, a plant or a part thereof.

35. A method for screening for an antagonists of the activity as characterized in claim 1:
i) contacting an organism, its cells, tissues or parts, which express the polypeptide with a chemical compound or a sample comprising a plurality of chemical compounds under conditions which permit the reduction or deletion of the expression of the nucleic acid molecule encoding the activity represented by the protein or which permit the reduction or deletion of the activity of the protein;
ii) assaying the level of the activity of the protein or the polypeptide expression level in the plant, its cells, tissues or parts thereof; and
iii) identifying an antagonist by comparing the measured level of the activity of the protein or the polypeptide expression level with a standard level of the activity of the protein or the polypeptide expression level measured in the absence of said chemical compound or a sample comprising said plurality of chemical compounds, whereby an decreased level in comparison to the standard indicates that the chemical compound or the sample comprising said plurality of chemical compounds is an antagonist.

36. A process for the identification of a compound conferring enhanced yield and/or as compared to a corresponding non-transformed wild type plant in a plant; comprising the steps:
(i) culturing or maintaining a plant or a part thereof expressing the polypeptide having the activity characterized in claim 1 or a polynucleotide encoding said polypeptide and a readout system capable of interacting with the polypeptide under suitable conditions which permit the interaction of the polypeptide with this readout system in the presence of a chemical compound or a sample comprising a plurality of chemical compounds and capable of providing a detectable signal in response to the binding of a chemical compound to said polypeptide under conditions which permit the depression of said readout system and of said polypeptide; and
(ii) identifying if the chemical compound is an effective antagonist by detecting the presence or absence or decrease or increase of a signal produced by said readout system.

37. A composition comprising the nucleic acid molecule of claim 10, a protein encoded by said nucleic acid molecule, a RNAi, snRNA, dsRNA, siRNA, miRNA, ta-siRNA, cosuppression molecule, ribozyme, or antisense nucleic acid molecule for the reduction or expression of said nucleic acid molecule, a viral nucleic acid conferring the decline of an RNA molecule conferring the activity or expression of said nucleic acid molecule, a nucleic acid construct or a vector comprising said nucleic acid molecule, said RNAi, snRNA, dsRNA, siRNA, miRNA, ta-siRNA, cosuppression molecule, ribozyme, or antisense nucleic acid molecule, or said viral nucleic acid, or a transgenic plant cell, plant or a part thereof transformed with said nucleic acid molecule, said RNAi, snRNA, dsRNA, siRNA, miRNA, ta-siRNA, cosuppression molecule, ribozyme, or antisense nucleic acid molecule, said viral nucleic acid, said nucleic acid construct, or said vector, and optionally an agricultural acceptable carrier.

38. Food or feed composition comprising the nucleic acid molecule of claim 10, a protein encoded by said nucleic acid molecule, a RNAi, snRNA, dsRNA, siRNA, miRNA, ta-siRNA, cosuppression molecule, ribozyme, or antisense nucleic acid molecule for the reduction or expression of said nucleic acid molecule, a viral nucleic acid conferring the decline of an RNA molecule conferring the activity or expression of said nucleic acid molecule, a nucleic acid construct or a vector comprising said nucleic acid molecule, said RNAi, snRNA, dsRNA, siRNA, miRNA, ta-siRNA, cosuppression molecule, ribozyme, or antisense nucleic acid molecule, or said viral nucleic acid, or a transgenic plant cell, plant or a part thereof transformed with said nucleic acid molecule, said RNAi, snRNA, dsRNA, siRNA, miRNA, ta-siRNA, cosuppression molecule, ribozyme, or antisense nucleic acid molecule, said viral nucleic acid, said nucleic acid construct, or said vector.

39. A method for preparing a plant cell with enhanced NUE and/or increased biomass production as compared to a corresponding non-transformed wild type plant cell, a plant or part of a plant, comprising utilizing
i) the nucleic acid molecule of acid claim 10, a RNAi, snRNA, dsRNA, siRNA, miRNA, ta-siRNA, cosuppression molecule, ribozyme, or antisense nucleic acid molecule for the reduction or expression of said nucleic acid molecule, a viral nucleic acid conferring the decline of an RNA molecule conferring the activity or expression of said nucleic acid molecule, or
ii) a nucleic acid construct comprising said nucleic acid molecule, said RNAi, snRNA, dsRNA, siRNA, miRNA, ta-siRNA, cosuppression molecule, ribozyme, or antisense nucleic acid molecule, or said viral nucleic acid, or
iii) a vector comprising said nucleic acid molecule, said RNAi, snRNA, dsRNA, siRNA, miRNA, ta-siRNA, cosuppression molecule, ribozyme, or antisense nucleic acid molecule, said viral nucleic acid, or said nucleic acid construct.

40. A method for determining the nitrogen content of test soil comprising the following steps:
a) optionally, growing a plant comprising the nucleic acid molecule of claim 11 in a soil without nitrogen deficiency; comparing the yield and determining the yield difference of said plant with the yield of a control plant growing in said soil or a wild-type plant, and selection said plant, if said plant does not show an increased yield compared to control plant;
b) growing of said plant comprising the nucleic acid molecule of claim 11 in a soil to be tested,
c) comparing the yield and determining the yield difference of said plant produced with the yield of a control plant growing in said soil under the same conditions, preferably with a wild-type plant,
whereby an enhanced yield of the said plant compared to said control plant indicates an nitrogen deficiency of the soil.

The application's sequence listing, which the Patent Office published only in electronic form, follows.

SEQUENCE LISTING (380 sequences)

SEQ ID NO: 1 - DNA, 8045 bp, Artificial sequence
  T-DNA insertion vector used to create knock-out plant lines
  misc_feature (945)..(1945): pVS1 sta
  rep_origin (2538)..(3538): pVS1
  misc_feature (3948)..(4208): pBR322 bom
  rep_origin (4348)..(4628): pBR322
  misc_feature (4922)..(5713): Kanamycin resistance
  misc_feature (6138)..(6163): T-DNA left border
  promoter (6241)..(6718): mas 2'1' promoter
  primer_bind (6507)..(6525): mas271_f
  misc_feature (6722)..(7288): bar
  primer_bind (7280)..(7304): M1300_7329
  polyA_signal (7292)..(7503): OCS poly(A)
  primer_bind (7923)..(7944): Right border rev primer
  misc_feature (7924)..(7949): T-DNA right border
actttgatccaacccctccgctgctatagtgcagtcggcttctgacgttcagtgcagccgtcttctgaaaacgacatgtcgcacaagtcctaagttacgcgacaggctgccgccctgcccttttcctggcgttttcttgtcgcgtgttttagtcgcataaagtagaatacttgcgactagaaccggagacattacgccatgaacaagagcgccgccgctggcctgctgggctatgcccgcgtcagcaccgacgaccaggacttgaccaaccaacgggccgaactgcacgcggccggctgcaccaagctgttttccgagaagatcaccggcaccaggcgcgaccgcccggagctggccaggatgcttgaccacctacgccctggcgacgttgtgacagtgaccaggctagaccgcctggcccgcagcacccgcgacctactggacattgccgagcgcatccaggaggccggcgcgggcctgcgtagcctggcagagccgtgggccgacaccaccacgccggccggccgcatggtgttgaccgtgttcgccggcattgccgagttcgagcgttccctaatcatcgaccgcacccggagcgggcgcgaggccgccaaggcccgaggcgtgaagtttggcccccgccctaccctcaccccggcacagatcgcgcacgcccgcgagctgatcgaccaggaaggccgcaccgtgaaagaggcggctgcactgcttggcgtgcatcgctcgaccctgtaccgcgcacttgagcgcagcgaggaagtgacgcccaccgaggccaggcggcgcggtgccttccgtgaggacgcattgaccgaggccgacgccctggcggccgccgagaatgaacgccaagaggaacaagcatgaaaccgcaccaggacggccaggacgaaccgtttttcattaccgaagagatcgaggcggagatgatcgcggccgggtacgtgttcgagccgcccgcgcacgtctcaaccgtgcggctgcatgaaatcctggccggtttgtctgatgccaagctggcggcctggccggccagcttggccgctgaagaaaccgagcgccgccgtctaaaaaggtgatgtgtatttgagtaaaacagcttgcgtcatgcggtcgctgcgtatatgatgcgatgagtaaataaacaaatacgcaaggggaacgcatgaaggttatcgctgtacttaaccagaaaggcgggtcaggcaagacgaccatcgcaacccatctagcccgcgccctgcaactcgccggggccgatgttctgttagtcgattccgatccccagggcagtgcccgcgattgggcggccgtgcgggaagatcaaccgctaaccgttgtcggcatcgaccgcccgacgattgaccgcgacgtgaaggccatcggccggcgcgacttcgtagtgatcgacggagcgccccaggcggcggacttggctgtgtccgcgatcaaggcagccgacttcgtgctgattccggtgcagccaagcccttacgacatatgggccaccgccgacctggtggagctggttaagcagcgcattgaggtcacggatggaaggctacaagcggcctttgtcgtgtcgcgggcgatcaaaggcacgcgcatcggcggtgaggttgccgaggcgctggccgggtacgagctgcccattcttgagtcccgtatcacgcagcgcgtgagctacccaggcactgccgccgccggcacaaccgttcttgaatcagaacccgagggcgacgctgcccgcgaggtccaggcgctggccgctgaaattaaatcaaaactcatttgagttaatgaggtaaagagaaaatgagcaaaagcacaaacacgctaagtgccggccgtccgagcgcacgcagcagcaaggctgcaacgttggccagcctggcagacacgccagccatgaagcgggtcaactttcagttgccggcggaggatcacaccaagctgaagatgtacgcggtacgccaaggcaagaccattaccgagctgctatctgaatacatcgcgcagctaccagagtaaatgagcaaatgaataaatgagtagatgaattttagcggctaaaggaggcggcatggaaaatcaagaacaaccaggcaccgacgccgtggaatgccccatgtgtggaggaacgggcggttggccaggcgtaagcggctgggttgtctgccggccctgcaatggcactggaacccccaagcccgaggaatcggcgtgacggtcgcaaaccatccggcccggtacaaatcggcgcggcgctgggtgatgacctggtggagaagttgaaggccgcgcaggccgcccagcggcaacgcatcgaggcagaagcacgccccggtgaatcgtggcaagcggccgctgatcgaatccgcaaagaatcccggcaaccgccggcagccggtgcgccgtcgattaggaagccgcccaagggcgacgagcaaccagattttttcgttccgatgctctatgacgtgggcacccgcgatagtcgcagcatcatggacgtggccgttttccgtctgtcgaagcgtgaccgacgagctggcgaggtgatccgctacgagcttccagacgggcacgtagaggtttccgcagggccggccggcatggccagtgtgtgggattacgacctggtactgatggcggtttcccatctaaccgaatccatgaaccgataccgggaagggaagggagacaagcccggccgcgtgttccgtccacacgttgcggacgtactcaagttctgccggcgagccgatggcggaaagcagaaagacgacctggtagaaacctgcattcggttaaacaccacgcacgttgccatgcagcgtacgaagaaggccaagaacggccgcctggtgacggtatccgagggtgaagccttgattagccgctacaagatcgtaaagagcgaaaccgggcggccggagtacatcgagatcgagctagctgattggatgtaccgcgagatcacagaaggcaagaacccggacgtgctgacggttcaccccgattactttttgatcgatcccggcatcggccgttttctctaccgcctggcacgccgcgccgcaggcaaggcagaagccagatggttgttcaagacgatctacgaacgcagtggcagcgccggagagttcaagaagttctgtttcaccgtgcgcaagctgatcgggtcaaatgacctgccggagtacgatttgaaggaggaggcggggcaggctggcccgatcctagtcatgcgctaccgcaacctgatcgagggcgaagcatccgccggttcctaatgtacggagcagatgctagggcaaattgccctagcaggggaaaaaggtcgaaaaggtctctttcctgtggatagcacgtacattgggaacccaaagccgtacattgggaaccggaacccgtacattgggaacccaaagccgtacattgggaaccggtcacacatgtaagtgactgatataaaagagaaaaaaggcgatttttccgcctaaaactctttaaaacttattaaaactcttaaaacccgcctggcctgtgcataactgtctggccagcgcacagccgaagagctgcaaaaagcgcctacccttcggtcgctgcgctccctacgccccgccgcttcgcgtcggcctatcgcggccgctggccgctcaaaaatggctggcctacggccaggcaatctaccagggcgcggacaagccgcgccgtcgccactcgaccgccggcgcccacatcaaggcaccctgcctcgcgcgtttcggtgatgacggtgaaaacctctgacacatgcagctcccggagacggtcacagcttgtctgtaagcggatgccgggagcagacaagcccgtcagggcgcgtcagcgggtgttggcgggtgtcggggcgcagccatgacccagtcacgtagcgatagcggagtgtatactggcttaactatgcggcatcagagcagattgtactgagagtgcaccatatgcggtgtgaaataccgcacagatgcgtaaggagaaaataccgcatcaggcgctcttccgcttcctcgctcactgactcgctgcgctcggtcgttcggctgcggcgagcggtatcagctcactcaaaggcggtaatacggttatccacagaatcaggggataacgcaggaaagaacatgtgagcaaaaggccagcaaaaggccaggaaccgtaaaaaggccgcgttgctggcgtttttccataggctccgcccccctgacgagcatcacaaaaatcgacgctcaagtcagaggtggcgaaacccgacaggactataaagataccaggcgtttccccctggaagctccctcgtgcgctctcctgttccgaccctgccgcttaccggatacctgtccgcctttctcccttcgggaagcgtggcgctttctcatagctcacgctgtaggtatctcagttcggtgtaggtcgttcgctccaagctgggctgtgtgcacgaaccccccgttcagcccgaccgctgcgccttatccggtaactatcgtcttgagtccaacccggtaagacacgacttatcgccactggcagcagccactggtaacaggattagcagagcgaggtatgtaggcggtgctacagagttcttgaagtggtggcctaactacggctacactagaaggacagtatttggtatctgcgctctgctgaagccagttaccttcggaaaaagagttggtagctcttgatccggcaaacaaaccaccgctggtagcggtggtttttttgtttgcaagcagcagattacgcgcagaaaaaaaggatctcaagaagatcctttgatcttttctacggggtctgacgctcagtggaacgaaaactcacgttaagggattttggtcatgcattctaggtactaaaacaattcatccagtaaaatataatattttattttctcccaatcaggcttgatccccagtaagtcaaaaaatagctcgacatactgttcttccccgatatcctccctgatcgaccggacgcagaaggcaatgtcataccacttgtccgccctgccgcttctcccaagatcaataaagccacttactttgccatctttcacaaagatgttgctgtctcccaggtcgccgtgggaaaagacaagttcctcttcgggcttttccgtctttaaaaaatcatacagctcgcgcggatctttaaatggagtgtcttcttcccagttttcgcaatccacatcggccagatcgttattcagtaagtaatccaattcggctaagcggctgtctaagctattcgtatagggacaatccgatatgtcgatggagtgaaagagcctgatgcactccgcatacagctcgataatcttttcagggctttgttcatcttcatactcttccgagcaaaggacgccatcggcctcactcatgagcagattgctccagccatcatgccgttcaaagtgcaggacctttggaacaggcagctttccttccagccatagcatcatgtccttttcccgttccacatcataggtggtccctttataccggctgtccgtcatttttaaatataggttttcattttctcccaccagcttatataccttagcaggagacattccttccgtatcttttacgcagcggtatttttcgatcagttttttcaattccggtgatattctcattttagccatttattatttccttcctcttttctacagtatttaaagataccccaagaagctaattataacaagacgaactccaattcactgttccttgcattctaaaaccttaaataccagaaaacagctttttcaaagttgttttcaaagttggcgtataacatagtatcgacggagccgattttgaaaccgcggtgatcacaggcagcaacgctctgtcatcgttacaatcaacatgctaccctccgcgagatcatccgtgtttcaaacccggcagcttagttgccgttcttccgaatagcatcggtaacatgagcaaagtctgccgccttacaacggctctcccgctgacgccgtcccggactgatgggctgcctgtatcgagtggtgattttgtgccgagctgccggtcggggagctgttggctggctggtggcaggatatattgtggtgtaaacaaattgacgcttagacaacttaataacacattgcggacgtttttaatgtactgaattaacgccgaattactagatatcgatttggtgtatcgagattggttatgaaattcagatgctagtgtaatgtattggtaatttgggaagatataataggaagcaaggctatttatccatttctgaaaaggcgaaatggcgtcaccgcgagcgtcacgcgcattccgttcttgctgtaaagcgttgtttggtacacttttgactagcgaggcttggcgtgtcagcgtatctattcaaaagtcgttaatggctgcggatcaagaaaaagttggaatagaaacagaatacccgcgaaattcaggcccggttgccatgtcctacacgccgaaataaacgaccaaattagtagaaaaataaaaactgactcggatacttacgtcacgtcttgcgcactgatttgaaaaatctcaatataaacaaagacggccacaagaaaaaaccaaaacaccgatattcattaatcttatctagtttctcaaaaaaattcatatcttccacacgtggatccgtcgagtctaccatgagcccagaacgacgcccggccgacatccgccgtgccaccgaggcggacatgccggcggtctgcaccatcgtcaaccactacatcgagacaagcacggtcaacttccgtaccgagccgcaggaaccgcaggagtggacggacgacctcgtccgtctgcgggagcgctatccctggctcgtcgccgaggtggacggcgaggtcgccggcatcgcctacgcgggcccctggaaggcacgcaacgcctacgactggacggccgagtcgaccgtgtacgtctccccccgccaccagcggacgggactgggctccacgctctacacccacctgctgaagtccctggaggcacagggcttcaagagcgtggtcgctgtcatcgggctgcccaacgacccgagcgtgcgcatgcacgaggcgctcggatatgccccccgcggcatgctgcgggcggccggcttcaagcacgggaactggcatgacgtgggtttctggcagctggacttcagcctgccggtaccgccccgtccggtcctgcccgtcaccgagatttgactcgaccggcatgccctgctttaatgagatatgcgagacgcctatgatcgcatgatatttgctttcaattctgttgtgcacgttgtaaaaaacctgagcatgtgtagctcagatccttaccgccggtttcggttcattctaatgaatatatcacccgttactatcgtatttttatgaataatattctccgttcaatttactgattgtccaagcttaatgtgagttagctcactcattaggcaccccaggctttacactttatgcttccggctcgtatgttgtgtggaattgtgagcggataacaatttcacacaggaaacagctatgacatgattacgaattcgagctcggtacccggggatcctctagagtcgacctgcaggcatgcaagcttggcactggccgtcgttttacaacgtcgtgactgggaaaaccctggcgttacccaacttaatcgccttgcagcacatccccctttcgccagctggcgtaatagcgaagaggcccgcaccgatcgcccttcccaacagttgcgcagcctgaatggcgaatgctagagcagcttgagcttggatcagattgtcgtttcccgccttcagtttaaactatcagtgtttgacaggatatattggcgggtaaacctaagagaaaagagcgtttattagaataacggatatttaaaagggcgtgaaaaggtttatccgttcgtccatttgtatgtgcatgccaaccacagggttcccctcgggatcaaagt

SEQ ID NO: 2 - DNA, 8885 bp, Artificial sequence
  vector used for antisense expression and co-suppression experiments
  polyA_signal (48)..(317): Nos 3' terminator
  primer_bind (67)..(86): ORF ID nested
  misc_feature (572)..(597): T-DNA right border
  misc_feature (1638)..(2638): pVS1 sta
  rep_origin (3231)..(4231): pVS1
  misc_feature (4641)..(4901): pBR322 bom
  rep_origin (5041)..(5321): pBR322
  misc_feature (5615)..(6406): Kanamycin resistance
  misc_feature (6831)..(6856): T-DNA left border
  polyA_signal (6924)..(7137): OCSpA
  misc_feature (7139)..(7690): bar
  promoter (7704)..(7888): mas1'del100
  promoter (7895)..(8885): PcUbi4-2
  primer_bind (8809)..(8831): PcUbi foreward
  primer_bind (8835)..(8863): PcUbi foreward nested
gggttgctcttccatggcaatgattaattaacgaagagcaagagctcgaatttccccgatcgttcaaacatttggcaataaagtttcttaagattgaatcctgttgccggtcttgcgatgattatcatataatttctgttgaattacgttaagcatgtaataattaacatgtaatgcatgacgttatttatgagatgggtttttatgattagagtcccgcaattatacatttaatacgcgatagaaaacaaaatatagcgcgcaaactaggataaattatcgcgcgcggtgtcatctatgttactagatcgggaattggcatgcaagcttggcactggccgtcgttttacaacgtcgtgactgggaaaaccctggcgttacccaacttaatcgccttgcagcacatccccctttcgccagctggcgtaatagcgaagaggcccgcaccgatcgcccttcccaacagttgcgcagcctgaatggcgaatgctagagcagcttgagcttggatcagattgtcgtttcccgccttcagtttaaactatcagtgtttgacaggatatattggcgggtaaacctaagagaaaagagcgtttattagaataacggatatttaaaagggcgtgaaaaggtttatccgttcgtccatttgtatgtgcatgccaaccacagggttcccctcgggatcaaagtactttgatccaacccctccgctgctatagtgcagtcggcttctgacgttcagtgcagccgtcttctgaaaacgacatgtcgcacaagtcctaagttacgcgacaggctgccgccctgcccttttcctggcgttttcttgtcgcgtgttttagtcgcataaagtagaatacttgcgactagaaccggagacattacgccatgaacaagagcgccgccgctggcctgctgggctatgcccgcgtcagcaccgacgaccaggacttgaccaaccaacgggccgaactgcacgcggccggctgcaccaagctgttttccgagaagatcaccggcaccaggcgcgaccgcccggagctggccaggatgcttgaccacctacgccctggcgacgttgtgacagtgaccaggctagaccgcctggcccgcagcacccgcgacctactggacattgccgagcgcatccaggaggccggcgcgggcctgcgtagcctggcagagccgtgggccgacaccaccacgccggccggccgcatggtgttgaccgtgttcgccggcattgccgagttcgagcgttccctaatcatcgaccgcacccggagcgggcgcgaggccgccaaggcccgaggcgtgaagtttggcccccgccctaccctcaccccggcacagatcgcgcacgcccgcgagctgatcgaccaggaaggccgcaccgtgaaagaggcggctgcactgcttggcgtgcatcgctcgaccctgtaccgcgcacttgagcgcagcgaggaagtgacgcccaccgaggccaggcggcgcggtgccttccgtgaggacgcattgaccgaggccgacgccctggcggccgccgagaatgaacgccaagaggaacaagcatgaaaccgcaccaggacggccaggacgaaccgtttttcattaccgaagagatcgaggcggagatgatcgcggccgggtacgtgttcgagccgcccgcgcacgtctcaaccgtgcggctgcatgaaatcctggccggtttgtctgatgccaagctggcggcctggccggccagcttggccgctgaagaaaccgagcgccgccgtctaaaaaggtgatgtgtatttgagtaaaacagcttgcgtcatgcggtcgctgcgtatatgatgcgatgagtaaataaacaaatacgcaaggggaacgcatgaaggttatcgctgtacttaaccagaaaggcgggtcaggcaagacgaccatcgcaacccatctagcccgcgccctgcaactcgccggggccgatgttctgttagtcgattccgatccccagggcagtgcccgcgattgggcggccgtgcgggaagatcaaccgctaaccgttgtcggcatcgaccgcccgacgattgaccgcgacgtgaaggccatcggccggcgcgacttcgtagtgatcgacggagcgccccaggcggcggacttggctgtgtccgcgatcaaggcagccgacttcgtgctgattccggtgcagccaagcccttacgacatatgggccaccgccgacctggtggagctggttaagcagcgcattgaggtcacggatggaaggctacaagcggcctttgtcgtgtcgcgggcgatcaaaggcacgcgcatcggcggtgaggttgccgaggcgctggccgggtacgagctgcccattcttgagtcccgtatcacgcagcgcgtgagctacccaggcactgccgccgccggcacaaccgttcttgaatcagaacccgagggcgacgctgcccgcgaggtccaggcgctggccgctgaaattaaatcaaaactcatttgagttaatgaggtaaagagaaaatgagcaaaagcacaaacacgctaagtgccggccgtccgagcgcacgcagcagcaaggctgcaacgttggccagcctggcagacacgccagccatgaagcgggtcaactttcagttgccggcggaggatcacaccaagctgaagatgtacgcggtacgccaaggcaagaccattaccgagctgctatctgaatacatcgcgcagctaccagagtaaatgagcaaatgaataaatgagtagatgaattttagcggctaaaggaggcggcatggaaaatcaagaacaaccaggcaccgacgccgtggaatgccccatgtgtggaggaacgggcggttggccaggcgtaagcggctgggttgtctgccggccctgcaatggcactggaacccccaagcccgaggaatcggcgtgacggtcgcaaaccatccggcccggtacaaatcggcgcggcgctgggtgatgacctggtggagaagttgaaggccgcgcaggccgcccagcggcaacgcatcgaggcagaagcacgccccggtgaatcgtggcaagcggccgctgatcgaatccgcaaagaatcccggcaaccgccggcagccggtgcgccgtcgattaggaagccgcccaagggcgacgagcaaccagattttttcgttccgatgctctatgacgtgggcacccgcgatagtcgcagcatcatggacgtggccgttttccgtctgtcgaagcgtgaccgacgagctggcgaggtgatccgctacgagcttccagacgggcacgtagaggtttccgcagggccggccggcatggccagtgtgtgggattacgacctggtactgatggcggtttcccatctaaccgaatccatgaaccgataccgggaagggaagggagacaagcccggccgcgtgttccgtccacacgttgcggacgtactcaagttctgccggcgagccgatggcggaaagcagaaagacgacctggtagaaacctgcattcggttaaacaccacgcacgttgccatgcagcgtacgaagaaggccaagaacggccgcctggtgacggtatccgagggtgaagccttgattagccgctacaagatcgtaaagagcgaaaccgggcggccggagtacatcgagatcgagctagctgattggatgtaccgcgagatcacagaaggcaagaacccggacgtgctgacggttcaccccgattactttttgatcgatcccggcatcggccgttttctctaccgcctggcacgccgcgccgcaggcaaggcagaagccagatggttgttcaagacgatctacgaacgcagtggcagcgccggagagttcaagaagttctgtttcaccgtgcgcaagctgatcgggtcaaatgacctgccggagtacgatttgaaggaggaggcggggcaggctggcccgatcctagtcatgcgctaccgcaacctgatcgagggcgaagcatccgccggttcctaatgtacggagcagatgctagggcaaattgccctagcaggggaaaaaggtcgaaaaggtctctttcctgtggatagcacgtacattgggaacccaaagccgtacattgggaaccggaacccgtacattgggaacccaaagccgtacattgggaaccggtcacacatgtaagtgactgatataaaagagaaaaaaggcgatttttccgcctaaaactctttaaaacttattaaaactcttaaaacccgcctggcctgtgcataactgtctggccagcgcacagccgaagagctgcaaaaagcgcctacccttcggtcgctgcgctccctacgccccgccgcttcgcgtcggcctatcgcggccgctggccgctcaaaaatggctggcctacggccaggcaatctaccagggcgcggacaagccgcgccgtcgccactcgaccgccggcgcccacatcaaggcaccctgcctcgcgcgtttcggtgatgacggtgaaaacctctgacacatgcagctcccggagacggtcacagcttgtctgtaagcggatgccgggagcagacaagcccgtcagggcgcgtcagcgggtgttggcgggtgtcggggcgcagccatgacccagtcacgtagcgatagcggagtgtatactggcttaactatgcggcatcagagcagattgtactgagagtgcaccatatgcggtgtgaaataccgcacagatgcgtaaggagaaaataccgcatcaggcgctcttccgcttcctcgctcactgactcgctgcgctcggtcgttcggctgcggcgagcggtatcagctcactcaaaggcggtaatacggttatccacagaatcaggggataacgcaggaaagaacatgtgagcaaaaggccagcaaaaggccaggaaccgtaaaaaggccgcgttgctggcgtttttccataggctccgcccccctgacgagcatcacaaaaatcgacgctcaagtcagaggtggcgaaacccgacaggactataaagataccaggcgtttccccctggaagctccctcgtgcgctctcctgttccgaccctgccgcttaccggatacctgtccgcctttctcccttcgggaagcgtggcgctttctcatagctcacgctgtaggtatctcagttcggtgtaggtcgttcgctccaagctgggctgtgtgcacgaaccccccgttcagcccgaccgctgcgccttatccggtaactatcgtcttgagtccaacccggtaagacacgacttatcgccactggcagcagccactggtaacaggattagcagagcgaggtatgtaggcggtgctacagagttcttgaagtggtggcctaactacggctacactagaaggacagtatttggtatctgcgctctgctgaagccagttaccttcggaaaaagagttggtagctcttgatccggcaaacaaaccaccgctggtagcggtggtttttttgtttgcaagcagcagattacgcgcagaaaaaaaggatctcaagaagatcctttgatcttttctacggggtctgacgctcagtggaacgaaaactcacgttaagggattttggtcatgcattctaggtactaaaacaattcatccagtaaaatataatattttattttctcccaatcaggcttgatccccagtaagtcaaaaaatagctcgacatactgttcttccccgatatcctccctgatcgaccggacgcagaaggcaatgtcataccacttgtccgccctgccgcttctcccaagatcaataaagccacttactttgccatctttcacaaagatgttgctgtctcccaggtcgccgtgggaaaagacaagttcctcttcgggcttttccgtctttaaaaaatcatacagctcgcgcggatctttaaatggagtgtcttcttcccagttttcgcaatccacatcggccagatcgttattcagtaagtaatccaattcggctaagcggctgtctaagctattcgtatagggacaatccgatatgtcgatggagtgaaagagcctgatgcactccgcatacagctcgataatcttttcagggctttgttcatcttcatactcttccgagcaaaggacgccatcggcctcactcatgagcagattgctccagccatcatgccgttcaaagtgcaggacctttggaacaggcagctttccttccagccatagcatcatgtccttttcccgttccacatcataggtggtccctttataccggctgtccgtcatttttaaatataggttttcattttctcccaccagcttatataccttagcaggagacattccttccgtatcttttacgcagcggtatttttcgatcagttttttcaattccggtgatattctcattttagccatttattatttccttcctcttttctacagtatttaaagataccccaagaagctaattataacaagacgaactccaattcactgttccttgcattctaaaaccttaaataccagaaaacagctttttcaaagttgttttcaaagttggcgtataacatagtatcgacggagccgattttgaaaccgcggtgatcacaggcagcaacgctctgtcatcgttacaatcaacatgctaccctccgcgagatcatccgtgtttcaaacccggcagcttagttgccgttcttccgaatagcatcggtaacatgagcaaagtctgccgccttacaacggctctcccgctgacgccgtcccggactgatgggctgcctgtatcgagtggtgattttgtgccgagctgccggtcggggagctgttggctggctggtggcaggatatattgtggtgtaaacaaattgacgcttagacaacttaataacacattgcggacgtttttaatgtactgaattaacgccgaattaagcttggacaatcagtaaattgaacggagaatattattcataaaaatacgatagtaacgggtgatatattcattagaatgaaccgaaaccggcggtaaggatctgagctacacatgctcaggttttttacaacgtgcacaacagaattgaaagcaaatatcatgcgatcataggcgtctcgcatatctcattaaagcagggcatgccggtcgagtcaaatctcggtgacgggcaggaccggacggggcggtaccggcaggctgaagtccagctgccagaaacccacgtcatgccagttcccgtgcttgaagccggccgcccgcagcatgccgcggggggcatatccgagcgcctcgtgcatgcgcacgctcgggtcgttgggcagcccgatgacagcgaccacgctcttgaagccctgtgcctccagggacttcagcaggtgggtgtagagcgtggagcccagtcccgtccgctggtggcggggggagacgtacacggtcgactcggccgtccagtcgtaggcgttgcgtgccttccaggggcccgcgtaggcgatgccggcgacctcgccgtccacctcggcgacgagccagggatagcgctcccgcagacggacgaggtcgtccgtccactcctgcggttcctgcggctcggtacggaagttgaccgtgcttgtctcgatgtagtggttgacgatggtgcagaccgccggcatgtccgcctcggtggcacggcggatgtcggccgggcgtcgttctgggctcatggtagactcgacggatccacgtgtggaagatatgaatttttttgagaaactagataagattaatgaatatcggtgttttggttttttcttgtggccgtctttgtttatattgagatttttcaaatcagtgcgcaagacgtgacgtaagtatccgagtcagtttttatttttctactaatttggtcgaagctttgggcggatcctctagagaattcgaatccaaaaattacggatatgaatataggcatatccgtatccgaattatccgtttgacagctagcaacgattgtacaattgcttctttaaaaaaggaagaaagaaagaaagaaaagaatcaacatcagcgttaacaaacggccccgttacggcccaaacggtcatatagagtaacggcgttaagcgttgaaagactcctatcgaaatacgtaaccgcaaacgtgtcatagtcagatcccctcttccttcaccgcctcaaacacaaaaataatcttctacagcctatatatacaacccccccttctatctctcctttctcacaattcatcatctttctttctctacccccaattttaagaaatcctctcttctcctcttcattttcaaggtaaatctctctctctctctctctctctgttattccttgttttaattaggtatgtattattgctagtttgttaatctgcttatcttatgtatgccttatgtgaatatctttatcttgttcatctcatccgtttagaagctataaatttgttgatttgactgtgtatctacacgtggttatgtttatatctaatcagatatgaatttcttcatattgttgcgtttgtgtgtaccaatccgaaatcgttgatttttttcatttaatcgtgtagctaattgtacgtatacatatggatctacgtatcaattgttcatctgtttgtgtttgtatgtatacagatctgaaaacatcacttctctcatctgattgtgttgttacatacatagatatagatctgttatatcattttttttattaattgtgtatatatatatgtgcatagatctggattacatgattgtgattatttacatgattttgttatttacgtatgtatatatgtagatctggactttttggagttgttgacttgattgtatttgtgtgtgtatatgtgtgttctgatcttgatatgttatgtatgtgcagccc

SEQ ID NO: 3 - DNA, 8422 bp, Artificial sequence
  vector used for RNAi experiments
  promoter (18)..(1008): PcUbi4-2
  Intron (1009)..(1543): Spacer
  polyA_signal (1545)..(1814): Nos 3' terminator
  misc_feature (2069)..(2094): T-DNA right border
  misc_feature (3135)..(4135): pVS1 sta
  rep_origin (4728)..(5728): pVS1
  misc_feature (6138)..(6398): pBR322 bom
  rep_origin (6538)..(6818): pBR322
  misc_feature (7112)..(7903): Kanamycin resistance
  misc_feature (8328)..(8353): T-DNA left border
agctttgggcggatcctctagagaattcgaatccaaaaattacggatatgaatataggcatatccgtatccgaattatccgtttgacagctagcaacgattttacaattgcttctttaaaaaaggaagaaagaaagaaagaaaagaatcaacatcagcgttaacaaacggccccgttacggcccaaacggtcatatagagtaacggcgttaagcgttgaaagactcctatcgaaatacgtaaccgcaaacgtgtcatagtcagatcccctcttccttcaccgcctcaaacacaaaaataatcttctacagcctatatatacaacccccccttctatctctcctttctcacaattcatcatctttctttctctacccccaattttaagaaatcctctcttctcctcttcattttcaaggtaaatctctctctctctctctctctctgttattccttgttttaattaggtatgtattattgctagtttgttaatctgcttatcttatgtatgccttatgtgaatatctttatcttgttcatctcatccgtttagaagctataaatttgttgatttgactgtgtatctacacgtggttatgtttatatctaatcagatatgaatttcttcatattgttgcgtttgtgtgtaccaatccgaaatcgttgatttttttcatttaatcgtgtagctaattgtacgtatacatatggatctacgtatcaattgttcatctgtttgtgtttgtatgtatacagatctgaaaacatcacttctctcatctgattgtgttgttacatacatagatatagatctgttatatcattttttttattaattgtgtatatatatatgtgcatagatctggattacatgattgtgattatttacatgattttgttatttacgtatgtatatatgtagatctggactttttggagttgttgacttgattgtatttgtgtgtgtatatgtgtgttctgatcttgatatgttatgtatgtgcagcccgggtaccgtcgaccaaaaatgtaactaatagcggcaacttggattcgacttcttcttcgacagggtcaataacagaggacgaaaaaagatcagaaccgaatgcagattccaataacatgacagggggcgagccaattgacccaagagatctcgattgggacgggcccgatgacccagacaatccgcataattggtcctctttgaagaaatggtatactactatgacttcagcttttctttgtttggtcgtcacaatgggtagttccctatatgtttcttccgtaccagaattggtagaaagatatcacgttagtcagactttggcgcttgctggtttaactttctatcttctgggtttatcgactgtcatcggcgctccattaagtgaagtgtttggtcgtaagcctgtctatttattttccctacctgtgtcaatgcttttcaccatgggtgttgggttatccaatggccacatgagaataattctacccctaaggtttttatcaggtgtctttgcactcgagtgtacagagctcgaatttccccgatcgttcaaacatttggcaataaagtttcttaagattgaatcctgttgccggtcttgcgatgattatcatataatttctgttgaattacgttaagcatgtaataattaacatgtaatgcatgacgttatttatgagatgggtttttatgattagagtcccgcaattatacatttaatacgcgatagaaaacaaaatatagcgcgcaaactaggataaattatcgcgcgcggtgtcatctatgttactagatcgggaattggcatgcaagcttggcactggccgtcgttttacaacgtcgtgactgggaaaaccctggcgttacccaacttaatcgccttgcagcacatccccctttcgccagctggcgtaatagcgaagaggcccgcaccgatcgcccttcccaacagttgcgcagcctgaatggcgaatgctagagcagcttgagcttggatcagattgtcgtttcccgccttcagtttaaactatcagtgtttgacaggatatattggcgggtaaacctaagagaaaagagcgtttattagaataacggatatttaaaagggcgtgaaaaggtttatccgttcgtccatttgtatgtgcatgccaaccacagggttcccctcgggatcaaagtactttgatccaacccctccgctgctatagtgcagtcggcttctgacgttcagtgcagccgtcttctgaaaacgacatgtcgcacaagtcctaagttacgcgacaggctgccgccctgcccttttcctggcgttttcttgtcgcgtgttttagtcgcataaagtagaatacttgcgactagaaccggagacattacgccatgaacaagagcgccgccgctggcctgctgggctatgcccgcgtcagcaccgacgaccaggacttgaccaaccaacgggccgaactgcacgcggccggctgcaccaagctgttttccgagaagatcaccggcaccaggcgcgaccgcccggagctggccaggatgcttgaccacctacgccctggcgacgttgtgacagtgaccaggctagaccgcctggcccgcagcacccgcgacctactggacattgccgagcgcatccaggaggccggcgcgggcctgcgtagcctggcagagccgtgggccgacaccaccacgccggccggccgcatggtgttgaccgtgttcgccggcattgccgagttcgagcgttccctaatcatcgaccgcacccggagcgggcgcgaggccgccaaggcccgaggcgtgaagtttggcccccgccctaccctcaccccggcacagatcgcgcacgcccgcgagctgatcgaccaggaaggccgcaccgtgaaagaggcggctgcactgcttggcgtgcatcgctcgaccctgtaccgcgcacttgagcgcagcgaggaagtgacgcccaccgaggccaggcggcgcggtgccttccgtgaggacgcattgaccgaggccgacgccctggcggccgccgagaatgaacgccaagaggaacaagcatgaaaccgcaccaggacggccaggacgaaccgtttttcattaccgaagagatcgaggcggagatgatcgcggccgggtacgtgttcgagccgcccgcgcacgtctcaaccgtgcggctgcatgaaatcctggccggtttgtctgatgccaagctggcggcctggccggccagcttggccgctgaagaaaccgagcgccgccgtctaaaaaggtgatgtgtatttgagtaaaacagcttgcgtcatgcggtcgctgcgtatatgatgcgatgagtaaataaacaaatacgcaaggggaacgcatgaaggttatcgctgtacttaaccagaaaggcgggtcaggcaagacgaccatcgcaacccatctagcccgcgccctgcaactcgccggggccgatgttctgttagtcgattccgatccccagggcagtgcccgcgattgggcggccgtgcgggaagatcaaccgctaaccgttgtcggcatcgaccgcccgacgattgaccgcgacgtgaaggccatcggccggcgcgacttcgtagtgatcgacggagcgccccaggcggcggacttggctgtgtccgcgatcaaggcagccgacttcgtgctgattccggtgcagccaagcccttacgacatatgggccaccgccgacctggtggagctggttaagcagcgcattgaggtcacggatggaaggctacaagcggcctttgtcgtgtcgcgggcgatcaaaggcacgcgcatcggcggtgaggttgccgaggcgctggccgggtacgagctgcccattcttgagtcccgtatcacgcagcgcgtgagctacccaggcactgccgccgccggcacaaccgttcttgaatcagaacccgagggcgacgctgcccgcgaggtccaggcgctggccgctgaaattaaatcaaaactcatttgagttaatgaggtaaagagaaaatgagcaaaagcacaaacacgctaagtgccggccgtccgagcgcacgcagcagcaaggctgcaacgttggccagcctggcagacacgccagccatgaagcgggtcaactttcagttgccggcggaggatcacaccaagctgaagatgtacgcggtacgccaaggcaagaccattaccgagctgctatctgaatacatcgcgcagctaccagagtaaatgagcaaatgaataaatgagtagatgaattttagcggctaaaggaggcggcatggaaaatcaagaacaaccaggcaccgacgccgtggaatgccccatgtgtggaggaacgggcggttggccaggcgtaagcggctgggttgtctgccggccctgcaatggcactggaacccccaagcccgaggaatcggcgtgacggtcgcaaaccatccggcccggtacaaatcggcgcggcgctgggtgatgacctggtggagaagttgaaggccgcgcaggccgcccagcggcaacgcatcgaggcagaagcacgccccggtgaatcgtggcaagcggccgctgatcgaatccgcaaagaatcccggcaaccgccggcagccggtgcgccgtcgattaggaagccgcccaagggcgacgagcaaccagattttttcgttccgatgctctatgacgtgggcacccgcgatagtcgcagcatcatggacgtggccgttttccgtctgtcgaagcgtgaccgacgagctggcgaggtgatccgctacgagcttccagacgggcacgtagaggtttccgcagggccggccggcatggccagtgtgtgggattacgacctggtactgatggcggtttcccatctaaccgaatccatgaaccgataccgggaagggaagggagacaagcccggccgcgtgttccgtccacacgttgcggacgtactcaagttctgccggcgagccgatggcggaaagcagaaagacgacctggtagaaacctgcattcggttaaacaccacgcacgttgccatgcagcgtacgaagaaggccaagaacggccgcctggtgacggtatccgagggtgaagccttgattagccgctacaagatcgtaaagagcgaaaccgggcggccggagtacatcgagatcgagctagctgattggatgtaccgcgagatcacagaaggcaagaacccggacgtgctgacggttcaccccgattactttttgatcgatcccggcatcggccgttttctctaccgcctggcacgccgcgccgcaggcaaggcagaagccagatggttgttcaagacgatctacgaacgcagtggcagcgccggagagttcaagaagttctgtttcaccgtgcgcaagctgatcgggtcaaatgacctgccggagtacgatttgaaggaggaggcggggcaggctggcccgatcctagtcatgcgctaccgcaacctgatcgagggcgaagcatccgccggttcctaatgtacggagcagatgctagggcaaattgccctagcaggggaaaaaggtcgaaaaggtctctttcctgtggatagcacgtacattgggaacccaaagccgtacattgggaaccggaacccgtacattgggaacccaaagccgtacattgggaaccggtcacacatgtaagtgactgatataaaagagaaaaaaggcgatttttccgcctaaaactctttaaaacttattaaaactcttaaaacccgcctggcctgtgcataactgtctggccagcgcacagccgaagagctgcaaaaagcgcctacccttcggtcgctgcgctccctacgccccgccgcttcgcgtcggcctatcgcggccgctggccgctcaaaaatggctggcctacggccaggcaatctaccagggcgcggacaagccgcgccgtcgccactcgaccgccggcgcccacatcaaggcaccctgcctcgcgcgtttcggtgatgacggtgaaaacctctgacacatgcagctcccggagacggtcacagcttgtctgtaagcggatgccgggagcagacaagcccgtcagggcgcgtcagcgggtgttggcgggtgtcggggcgcagccatgacccagtcacgtagcgatagcggagtgtatactggcttaactatgcggcatcagagcagattgtactgagagtgcaccatatgcggtgtgaaataccgcacagatgcgtaaggagaaaataccgcatcaggcgctcttccgcttcctcgctcactgactcgctgcgctcggtcgttcggctgcggcgagcggtatcagctcactcaaaggcggtaatacggttatccacagaatcaggggataacgcaggaaagaacatgtgagcaaaaggccagcaaaaggccaggaaccgtaaaaaggccgcgttgctggcgtttttccataggctccgcccccctgacgagcatcacaaaaatcgacgctcaagtcagaggtggcgaaacccgacaggactataaagataccaggcgtttccccctggaagctccctcgtgcgctctcctgttccgaccctgccgcttaccggatacctgtccgcctttctcccttcgggaagcgtggcgctttctcatagctcacgctgtaggtatctcagttcggtgtaggtcgttcgctccaagctgggctgtgtgcacgaaccccccgttcagcccgaccgctgcgccttatccggtaactatcgtcttgagtccaacccggtaagacacgacttatcgccactggcagcagccactggtaacaggattagcagagcgaggtatgtaggcggtgctacagagttcttgaagtggtggcctaactacggctacactagaaggacagtatttggtatctgcgctctgctgaagccagttaccttcggaaaaagagttggtagctcttgatccggcaaacaaaccaccgctggtagcggtggtttttttgtttgcaagcagcagattacgcgcagaaaaaaaggatctcaagaagatcctttgatcttttctacggggtctgacgctcagtggaacgaaaactcacgttaagggattttggtcatgcattctaggtactaaaacaattcatccagtaaaatataatattttattttctcccaatcaggcttgatccccagtaagtcaaaaaatagctcgacatactgttcttccccgatatcctccctgatcgaccggacgcagaaggcaatgtcataccacttgtccgccctgccgcttctcccaagatcaataaagccacttactttgccatctttcacaaagatgttgctgtctcccaggtcgccgtgggaaaagacaagttcctcttcgggcttttccgtctttaaaaaatcatacagctcgcgcggatctttaaatggagtgtcttcttcccagttttcgcaatccacatcggccagatcgttattcagtaagtaatccaattcggctaagcggctgtctaagctattcgtatagggacaatccgatatgtcgatggagtgaaagagcctgatgcactccgcatacagctcgataatcttttcagggctttgttcatcttcatactcttccgagcaaaggacgccatcggcctcactcatgagcagattgctccagccatcatgccgttcaaagtgcaggacctttggaacaggcagctttccttccagccatagcatcatgtccttttcccgttccacatcataggtggtccctttataccggctgtccgtcatttttaaatataggttttcattttctcccaccagcttatataccttagcaggagacattccttccgtatcttttacgcagcggtatttttcgatcagttttttcaattccggtgatattctcattttagccatttattatttccttcctcttttctacagtatttaaagataccccaagaagctaattataacaagacgaactccaattcactgttccttgcattctaaaaccttaaataccagaaaacagctttttcaaagttgttttcaaagttggcgtataacatagtatcgacggagccgattttgaaaccgcggtgatcacaggcagcaacgctctgtcatcgttacaatcaacatgctaccctccgcgagatcatccgtgtttcaaacccggcagcttagttgccgttcttccgaatagcatcggtaacatgagcaaagtctgccgccttacaacggctctcccgctgacgccgtcccggactgatgggctgcctgtatcgagtggtgattttgtgccgagctgccggtcggggagctgttggctggctggtggcaggatatattgtggtgtaaacaaattgacgcttagacaacttaatacgtaagtatccgagtcagtttttatttttctactaatttggtcga

SEQ ID NO: 4 - DNA, 21 bp, Artificial sequence
  Primer used for identification of the T-DNA insertion site in the genome of Arabidopsis knock-out lines
tgacgccatttcgccttttca

SEQ ID NO: 5 - DNA, 23 bp, Artificial sequence
  Primer used for identification of the T-DNA insertion site in the genome of Arabidopsis knock-out lines
caacttaatcgccttgcagcaca

SEQ ID NO: 6 - DNA, 27 bp, Artificial sequence
  Primer used for identification of the T-DNA insertion site in the genome of Arabidopsis knock-out lines
cagaaatggataaatagccttgcttcc

SEQ ID NO: 7 - DNA, 21 bp, Artificial sequence
  Primer used for identification of the T-DNA insertion site in the genome of Arabidopsis knock-out lines
agctggcgtaatagcgaagag

SEQ ID NO: 8 - DNA, 23 bp, Artificial sequence
  Primer used for identification of the T-DNA insertion site in the genome of Arabidopsis knock-out lines
ccaatacattacactagcatctg

SEQ ID NO: 9 - DNA, 18 bp, Artificial sequence
  Primer used for identification of the T-DNA insertion site in the genome of Arabidopsis knock-out lines
aatgctagagcagcttga

SEQ ID NO: 10 - DNA, 22 bp, Artificial sequence
  Primer used for identification of the T-DNA insertion site in the genome of Arabidopsis knock-out lines
caatacattacactagcatctg

SEQ ID NO: 11 - DNA, 18 bp, Artificial sequence
  Primer used for identification of the T-DNA insertion site in the genome of Arabidopsis knock-out lines
agaggcccgcaccgatcg

SEQ ID NO: 12 - DNA, 22 bp, Artificial sequence
  Primer used for identification of the T-DNA insertion site in the genome of Arabidopsis knock-out lines
ctagcatctgaatttcataacc

SEQ ID NO: 13 - DNA, 21 bp, Artificial sequence
  Primer used for identification of the T-DNA insertion site in the genome of Arabidopsis knock-out lines
gcttgagcttggatcagattg

SEQ ID NO: 14 - DNA, 16 bp, Artificial sequence
  Primer used for identification of the T-DNA insertion site in the genome of Arabidopsis knock-out lines
  misc_feature (1)..(1): n is a, c, g, or t
  misc_feature (11)..(11): n is a, c, g, or t
ngtcgaswganawgaa

SEQ ID NO: 15 - DNA, 16 bp, Artificial sequence
  Primer used for identification of the T-DNA insertion site in the genome of Arabidopsis knock-out lines
  misc_feature (5)..(5): n is a, c, g, or t
  misc_feature (10)..(10): n is a, c, g, or t
  misc_feature (13)..(13): n is a, c, g, or t
wgtgnagwancanaga

SEQ ID NO: 16 - DNA, 16 bp, Artificial sequence
  Primer used for identification of the T-DNA insertion site in the genome of Arabidopsis knock-out lines
  misc_feature (5)..(5): n is a, c, g, or t
  misc_feature (10)..(10): n is a, c, g, or t
  misc_feature (13)..(13): n is a, c, g, or t
sttgntastnctntgc

SEQ ID NO: 17 - DNA, 16 bp, Artificial sequence
  Primer used for identification of the T-DNA insertion site in the genome of Arabidopsis knock-out lines
  misc_feature (5)..(5): n is a, c, g, or t
  misc_feature (10)..(10): n is a, c, g, or t
  misc_feature (13)..(13): n is a, c, g, or t
agwgnagwancanaga

SEQ ID NO: 18 - DNA, 16 bp, Artificial sequence
  Primer used for identification of the T-DNA insertion site in the genome of Arabidopsis knock-out lines
  misc_feature (1)..(1): n is a, c, g, or t
  misc_feature (11)..(11): n is a, c, g, or t
ntgcgaswganwagaa

SEQ ID NO: 19 - DNA, 16 bp, Artificial sequence
  Primer used for identification of the T-DNA insertion site in the genome of Arabidopsis knock-out lines
  misc_feature (1)..(1): n is a, c, g, or t
  misc_feature (11)..(11): n is a, c, g, or t
ntgcgaswgantagaa

SEQ ID NO: 20 - DNA, 17 bp, Artificial sequence
  Primer used for identification of the T-DNA insertion site in the genome of Arabidopsis knock-out lines
  misc_feature (9)..(9): n is a, c, g, or t
sstggstanatwatwct

SEQ ID NO: 21 - DNA, 9 bp, Artificial sequence
  Extension of 5 prime primer for amplification of antisense fragments from gene of interest
atacccggg

SEQ ID NO: 22 - DNA, 9 bp, Artificial sequence
  extension of 3 prime primer for amplification of antisense fragments from gene of interest
atagagctc

SEQ ID NO: 23 - DNA, 9 bp, Artificial sequence
  extension of 5 prime primer for amplification of  RNAi fragments from gene of interest
ataggtacc

SEQ ID NO: 24 - DNA, 9 bp, Artificial sequence
  extension of 3 prime primer for amplification of  RNAi fragments from gene of interest
atagtcgac

SEQ ID NO: 25 - DNA, 9 bp, Artificial sequence
  extension of 5 prime primer for amplification of cosuppression fragments from gene of interest
ataccatgg

SEQ ID NO: 26 - DNA, 11 bp, Artificial sequence
  extension of 3 prime primer for amplification of cosuppression fragments from gene of interest
atattaattaa

SEQ ID NO: 27 - DNA, 597 bp, Arabidopsis thaliana
  CDS (1)..(597)
atggctgtcgtcggcgctccaatatcgtctccggcggctcagctgcagacacaatttctctccaatcccattctcccccgctttcgccggtctttctccaccggaaaatcaccagcaactttctccgtcgtagctatggctccccagaaaaaggtgaacaaatatgatgccaagtggaagaaacaatggtacggagctggattgtttttcgaagggagtgagcaaataaacgttgatgttttcaagaagctggagaagcgaaaagtgttgagcaacgttgagaaatctggcctgctgtcaaaagcagaggggttgggactcacattgtcatctcttgagaagcttaaagtcttctccaaagcagaggaccttggtcttctcagtctccttgagaacttagctggaacatcgcctgcggtcttagcctcggctgcattaccagctctcacggctgctattgtagccgtggtgttgatcccggatgactcaactactctagtggttgctcaggcggttttggccggtgctcttgcgcttacaggggttgttttgttggttggttctgttgttttggatggacttcaagaagctgactga

SEQ ID NO: 28 - protein, 198 aa, Arabidopsis thaliana
MAVVGAPISSPAAQLQTQFLSNPILPRFRRSFSTGKSPATFSVVAMAPQKKVNKYDAKWKKQWYGAGLFFEGSEQINVDVFKKLEKRKVLSNVEKSGLLSKAEGLGLTLSSLEKLKVFSKAEDLGLLSLLENLAGTSPAVLASAALPALTAAIVAVVLIPDDSTTLVVAQAVLAGALALTGVVLLVGSVVLDGLQEAD

SEQ ID NO: 29 - DNA, 642 bp, Glycine max
  CDS (1)..(642)
atggagatgactactagcactctggttcttctgaggcacaacctcgttccaacagccatggcggtccctgctacatcctcagcccctgtccttcgacccatccccaccaaccgttccttctcttccccattccgttcactccccactcccaccacccgaaaacccctaaccgtcttcgccatggcccctaagaagaaggtgaacaagtacaacgaaaactggaaaaaggagtggtttggagcggggatattctacgaggggagcgaggaagtggaggtggacgtgttcaagaagctggagaagaggaaggttttgagcaacgtggagaaagcaggcttgctctccaaggcagaacaattaggattctcgctctcttccatagagaagctcggcgtcttctccaaagccgaagagctcggcttgctcagcttgctcgaccgagccgccagcttctccccctccctcctcgcctccgccgccctccccgccttcgtcgctgccattgccgccattgtgctcattcccgacgactctgccaccctcgtcgccgtccaggctgttgttgctgccgcgctcggcgtcggagccgtcgggcttttcgttggctccgtcgtgctcggcggcttgcaagaggctgattga

SEQ ID NO: 30 - protein, 213 aa, Glycine max
MEMTTSTLVLLRHNLVPTAMAVPATSSAPVLRPIPTNRSFSSPFRSLPTPTTRKPLTVFAMAPKKKVNKYNENWKKEWFGAGIFYEGSEEVEVDVFKKLEKRKVLSNVEKAGLLSKAEQLGFSLSSIEKLGVFSKAEELGLLSLLDRAASFSPSLLASAALPAFVAAIAAIVLIPDDSATLVAVQAVVAAALGVGAVGLFVGSVVLGGLQEAD

SEQ ID NO: 31 - DNA, 933 bp, Glycine max
  CDS (112)..(696)
tgctctctcttgatcgacccacgtggcagttgagttgagatatcaagcagaagcagaagaagaagaagaagcactctggttcttctgaggcacaacctcgttccaacagccatggcggttcctgcaacatcctcagcccctgtccttcgacccatccccaccaaccgttccttctcttccccattccgttcactccccactcccaccacccgaaaacccctaaccgtcttcgccatggcccctaagaagaaggtgaacaagtacaacgaaaactggaaaaaggagtggtttggcgcggggatattctacgaggggagcgaggaagtggaggtggacgtgttcaagaagctggagaagaggaaggttttgagcaacgtggagaaagcaggcttgctctccaaggcagaacaattaggattctcgctctcttccatagagaagctcggcgtcttctccaaagccgaagagctcggcttgctcagcttgctcgaccgagccgccagcttctccccctccgtcctcgcctccgccgccatccccgccttcgtcgccgcaatcgccgccgttgtcatcattcccgatgactccgccgcgctcgtcgccgtccaggctgttgttgccgccgcactcggcgtcggcgccgtcggtctgttcgttggctccgtcgtgctcggcggattgcaggaggcggattgattgattgattgattgattgaatgatgtgggaatggtatgtggatgaattaattttagaattttttttttttttttgtctttgtagttgtagaattgaggagagattatggctgtttcttttggtgtaaaaaattgtaataaaaaaatgaaaatgccaataattgactggaaatgggtgcatacaacaaaatgtagtgtctctgtctcttctgaatgaatgaattgctgttttctgcc

SEQ ID NO: 32 - protein, 194 aa, Glycine max
MAVPATSSAPVLRPIPTNRSFSSPFRSLPTPTTRKPLTVFAMAPKKKVNKYNENWKKEWFGAGIFYEGSEEVEVDVFKKLEKRKVLSNVEKAGLLSKAEQLGFSLSSIEKLGVFSKAEELGLLSLLDRAASFSPSVLASAAIPAFVAAIAAVVIIPDDSAALVAVQAVVAAALGVGAVGLFVGSVVLGGLQEAD

SEQ ID NO: 33 - DNA, 1120 bp, Zea mays
  CDS (140)..(709)
ctgtgcggtgctcgggccggccgggccgggacacagattccttcgattcccgctgacagcgaagctgaggagaatcccaagaaacagagctggtgaaattgcattgtcgcaacaggcaagcgaagaggagaagaaagaaatggctgcaatacctgcagcgatcccgggctgctgctcttcgtctcgcctgtctcagcttgctggcctccctgcctccacaagcagaaggcgcttcaaggtcacggccatggcgccccaaaagaaggtgaaccgctacgacgagaactggtcgaagcagtggttcggcgcgggcatcttcgcggagggcagcgaggtggtgtccgtggacgtgttcaagaagctggagcggcgcaaggtgctgagcaccgtggagaaggccggcctgctgtccaaggccgaggagctgggcctgacgctctcctcgctggagaagctgggcctgctctccaaggccgaggacctgggcctgctcagcctcgtcgagaccgcggcggggacgtccccctccgtcctcgcctccatctcgctgccgctcctcgtggccgccgtcgccgcggtggtcgtcgtgcccgacgactccgtcgcgctcgtcgccctacaggccgtcgtcgcggcggtgctcgcggcgggagccgccgggctgttcgtgggctccgtcgtgctcgctggcctgcaggagtcggattgatgcattgatctgcagctgcgcaaggtagaaccaagctgtgtacgtacgtcgacagtaccgccttgtgtagtaggatcgatcttgttagcagagcagaactcgttactaaaaaaatctatagtgtctgtaatataatataatactttagctttttgataacttgccgtgcaaatgtggtaacatattatgaagaaaattgcgatcaaatggacggttaactcggattcaaccagacacttttacaaccaatgcaaaaaaaaaatcgtttcccagagagaggagagccggtcatgtccttttggctgtttggtttatttttgagttcatgcggtctttatttatttccatgtacccagtacccaccttgtaccatgcatgttccttatgatacactcacctctttttgtttgc

SEQ ID NO: 34 - protein, 189 aa, Zea mays
MAAIPAAIPGCCSSSRLSQLAGLPASTSRRRFKVTAMAPQKKVNRYDENWSKQWFGAGIFAEGSEVVSVDVFKKLERRKVLSTVEKAGLLSKAEELGLTLSSLEKLGLLSKAEDLGLLSLVETAAGTSPSVLASISLPLLVAAVAAVVVVPDDSVALVALQAVVAAVLAAGAAGLFVGSVVLAGLQESD

SEQ ID NO: 35 - DNA, 564 bp, Oryza sativa (japonica cultivar-group)
  CDS (1)..(564)
atggctgccgtccaagcagcaatctccacctgctgctcttcgtcttgcctgtcccggccgccaccgccgttcgcgaggaggcggcgcttcaaggtcacggccatggctccccagaagaaggtgaacaggtacgacgagaagtggtcgaagcagtggttcggggcggggatattcgcggaggggagcgaggaggtggaggtggacgtgttcaagaagctggagaggcggaaggtgctgagcacggtggagaaggccgggctgctgtccagggcggaggagctcggcgtcacgctctcctcgctcgaggagctcggcctcctctccaaggccgaggacctcggcctcctcagcctcgtcgaggccgccgccgccgcctcccccgacgccctcgcctccgtctcgctcccgctcctcgtcgccgccatcgccgccgtcgtcctcgtccccgacgactccgccgccctcgtcgcgctccaggccgtcctcgccgccgtcctcctcgccgccgccgccggcctcttcgtcggctccgtcgtcctcgccggcctgcaggagtccgactga

SEQ ID NO: 36 - protein, 187 aa, Oryza sativa (japonica cultivar-group)
MAAVQAAISTCCSSSCLSRPPPPFARRRRFKVTAMAPQKKVNRYDEKWSKQWFGAGIFAEGSEEVEVDVFKKLERRKVLSTVEKAGLLSRAEELGVTLSSLEELGLLSKAEDLGLLSLVEAAAAASPDALASVSLPLLVAAIAAVVLVPDDSAALVALQAVLAAVLLAAAAGLFVGSVVLAGLQESD

SEQ ID NO: 37 - DNA, 585 bp, Glycine max
  CDS (1)..(585)
atggcggtccctgctacatcctcagcccctgtccttcgacccatccgcaccaatcactccttctcttcccctttccgctctctcccctctcccgccgccagaaaacccctaaccgtcttcgccatggcccccaaaaagaaggtgaacaagtacaatgataagtggaagaaggagtggtttggagcggggatattctacgagggaagcgaggaggtggaggtggacgtgttcaagaagatagagaagaggaaggttttgagcaacgtggagaaagctggcttgctctccaaggcagaggacttgggattcacgctctcttccatagagaagctcggcgtcttctccaaagccgaggagctcggcttgctcagcttgctcgaccgagccgccagcttctccccctccctcctcgcctccgccgccctccccgccttcgtcgctgccattgccgccattgtgctcattcccgacgactctgccaccctcgtcgccgtccaggctgttgttgctgccgcgctcggcgtcggagccgtcgggcttttcgttggctccgtcgtgctcggcggcttgcaagaggctgattga

SEQ ID NO: 38 - protein, 194 aa, Glycine max
MAVPATSSAPVLRPIRTNHSFSSPFRSLPSPAARKPLTVFAMAPKKKVNKYNDKWKKEWFGAGIFYEGSEEVEVDVFKKIEKRKVLSNVEKAGLLSKAEDLGFTLSSIEKLGVFSKAEELGLLSLLDRAASFSPSLLASAALPAFVAAIAAIVLIPDDSATLVAVQAVVAAALGVGAVGLFVGSVVLGGLQEAD

SEQ ID NO: 39 - DNA, 600 bp, Linum usitatissimum
  CDS (1)..(600)
atggcgatgacggtgattgctgctcagccatctcacaccgcttataatctcctccgtggtggacaaaacccgaccaaacatttcttatccaccaccaagctcccttctccgggaagaaaacccctctctatcgtggccatggctcctcaaaagaaggtgaacaagatggacaacgggtggaagaagcagtggtacggcgccgggatattctacgagagcggcgaggagctggaggttgacgtgttcaagaagctggagaagcgtaaagttctgagcagcgtcgagaaggccggacttctctccaaggcagaggagcttggtgtgacgctctcgtcgatcgagaagctagggttgttctccaaagcagaggaattggggcttctcagcttgttggagaatgtcgcggcagtttcccctgctgcgctggcctccgccgcgcttccggcgtttctggcggcggtggcggcgatcgtggtgattcctgatgattcgacggcgctggtggttgcccagactgttgtggctgggacgctagggttgggcgctgctggactgtttgttgggtctattgtgcttgaagggctgcaagaagctgattga

SEQ ID NO: 40 - protein, 199 aa, Linum usitatissimum
MAMTVIAAQPSHTAYNLLRGGQNPTKHFLSTTKLPSPGRKPLSIVAMAPQKKVNKMDNGWKKQWYGAGIFYESGEELEVDVFKKLEKRKVLSSVEKAGLLSKAEELGVTLSSIEKLGLFSKAEELGLLSLLENVAAVSPAALASAALPAFLAAVAAIVVIPDDSTALVVAQTVVAGTLGLGAAGLFVGSIVLEGLQEAD

SEQ ID NO: 41 - DNA, 770 bp, Brassica napus
  CDS (54)..(647)
gaagacatctccaaagctttttccttttctttcatagcttcgatcttcctccaatggctgtcaacgctccgatatcgtctcctgcggctcacccgcgaacacagtttctctccaaccccgttctccctcgctttcgccggtcatactccgccgttaaatcaccagcagccttctccgtcgtctcaatggctccccagaaaaaggtgaacaaatatgacgccaagtggaagaaacaatggtacggagcgggactattcttcgaaggaagcgaagaagtaaacgtcgacgttttcaagaagctagagaagcgaaaagtactaagcaacgtcgagaaatctggcctgctctcaaaagcagaagacttgggactcacgttgtcatcactcgagaagcttggtgtcttctccaaagccgaggagctcggtcttctaagtctccttgaaactttagcaagtacatcccctgcggtcctagcctcagctgcactcccggctctcacggctgctattgtagctatagtgctgattcctgatgactcaactactctggtggttgctcaagcggttttggccggtgctcttgctcttggagctgttgttttgttggttgggtccgttgttttggatggacttcaagaagctgattgattgctttctctgtaaacaaaactcaactaaaaaaccattgtggtacaattgtttttttgcaataagtttctatagaagaaggattctagcccaaaaaaaaaaaaaaaaaaaaaaaaaaaaaaa

SEQ ID NO: 42 - protein, 197 aa, Brassica napus
MAVNAPISSPAAHPRTQFLSNPVLPRFRRSYSAVKSPAAFSVVSMAPQKKVNKYDAKWKKQWYGAGLFFEGSEEVNVDVFKKLEKRKVLSNVEKSGLLSKAEDLGLTLSSLEKLGVFSKAEELGLLSLLETLASTSPAVLASAALPALTAAIVAIVLIPDDSTTLVVAQAVLAGALALGAVVLLVGSVVLDGLQEAD

SEQ ID NO: 43 - DNA, 588 bp, Glycine max
  CDS (1)..(585)
atggcggtccctgcaacatcctcagcccctgtccttcgacccatccccaccaaccgttccttctcttccccattccgttcactccccactcccaccacccgaaaacccctaaccgtcttcgccatggcccctaagaagaaggtgaacaagtacaacgaaaactggaaaaaggagtggtttggagcggggatattctacgaggggagcgaggaagtggaggtggacgtgttcaagaagctggagaagaggaaggttttgagcaacgtggagaaagcaggcttgctctccaaggcagaacaattaggattctcgctctcttccatagagaagctcggcgtcttctccaaagccgaagagctcggcttgctcagcttgctcgaccgagccgccagcttctccccctccctcctcgcctccgccgccctccccgccttcgtcgctgccattgccgccattgtgctcattcccgacgactctgccaccctcgtcgccgtccaggctgttgttgctgccgcgctcggcgtcggagccgtcgggcttttcgttggctccgtcgtgctcggcggcttgcaagaggctgattgattg

SEQ ID NO: 44 - protein, 194 aa, Glycine max
MAVPATSSAPVLRPIPTNRSFSSPFRSLPTPTTRKPLTVFAMAPKKKVNKYNENWKKEWFGAGIFYEGSEEVEVDVFKKLEKRKVLSNVEKAGLLSKAEQLGFSLSSIEKLGVFSKAEELGLLSLLDRAASFSPSLLASAALPAFVAAIAAIVLIPDDSATLVAVQAVVAAALGVGAVGLFVGSVVLGGLQEAD

SEQ ID NO: 45 - DNA, 844 bp, Glycine max
  CDS (28)..(612)
  misc_feature (782)..(782): n is a, g, c or t
  misc_feature (795)..(795): n is a, g, c or t
  misc_feature (808)..(808): n is a, g, c or t
  misc_feature (823)..(823): n is a, g, c or t
  misc_feature (824)..(824): n is a, g, c or t
ctgaggcacaacctcgttccaacagccatggcggttcctgcaacatcctcagcccctgtccttcgacccatccccaccaaccgttccttctcttccccattccgttcactccccactcccaccacccgaaaacccctaaccgtcttcgccatggcccctaagaagaaggtgaacaagtacaacgaaaactggaaaaaggagtggtttggcgcggggatattctacgaggggagcgaggaagtggaggtggacgtgttcaagaagctggagaagaggaaggttttgagcaacgtggagaaagcaggcttgctctccaaggcagaacaattaggattctcgctctcttccatagagaagctcggcgtcttctccaaagccgaagagctcggcttgctcagcttgctcgaccgagccgccagcttctccccctccgtcctcgcctccgccgccatccccgccttcgtcgctgccatcgccgccattgtcatcattcccgacgactctgccaccctcgtcgccgtccaggctgttgttgctgccgcgctcggcgtcggagccgtcgggcttttcgttggctccgtcgtgctcggcggcttgcaagaggctgattgattgaatggtgtgggaatggtatgtggatgaattcatcttagattttttttttttgtctttgtagttgtagaattgaggaggagagattatggcagtttcttttggtgtaaaaaaattgtaataaaaaaaatgaaatgacaataattgactggaaatggttgcatacaacnagaatgtagtagntgtctctgtctcnttgtgaatgaattgnnctgttttctgaaaaaaaaaa

SEQ ID NO: 46 - protein, 194 aa, Glycine max
MAVPATSSAPVLRPIPTNRSFSSPFRSLPTPTTRKPLTVFAMAPKKKVNKYNENWKKEWFGAGIFYEGSEEVEVDVFKKLEKRKVLSNVEKAGLLSKAEQLGFSLSSIEKLGVFSKAEELGLLSLLDRAASFSPSVLASAAIPAFVAAIAAIVIIPDDSATLVAVQAVVAAALGVGAVGLFVGSVVLGGLQEAD

SEQ ID NO: 47 - DNA, 908 bp, Triticum aestivum
  CDS (87)..(656)
ccacgcgtccgaagcagacaagtcaaaaaataaccagtgtttcgcatcagtagaggaagaagagagcagggaaagaggagggagaaatggctgcaatatcagcagcaatctccggctggtgctcttcgtcctgtctgtcccagtcccagcggggcctaccgtcccccgcaaggagaaggcacttcaaggtcacggctatggctcccaagaacaaggtgaacaagtacgacgatgggtggtccaagcagtggttcggcgcggggatcttcgcggaggggagcgaggaggcgtcggtggacgtgttcaagaagctggagaagcgcaaggtgctgagcagcgtggagaaggcggggctgctgtccaaggcggaggagctcggcgtcacgctctcctcgctggagaagctcggactgctctccaaggccgaggacctgggactcctcagcctcgtcgagagcgcagccacggtgtccccggccgtgctcgcatcgctgtcgctgccgctgctcgtcgcctccatcgccacggtcgtcttcgtgccggacgactccaccctgctggtgactgtccagacggtcgtcgctacgttgttcgcggccgtcgctgccgggctgttcgtcggctccgtcgtgctcgacggactgcaggacgattagcgccttcactccgttaatgtttgttttgtagtaggatagaccaccagtcgaccactgctactacgaataatagtgagttatgtgcgttcaagggcctcgtatttgttattccattgccccactactgattactagtataatgcccgtgatttgccacgggcctttaaatatcttttgtaattgcaagtaatgtgtagaaaagacaacctctaacaatcagaaagtaatcaaaatccactacatttactatgc

SEQ ID NO: 48 - protein, 189 aa, Triticum aestivum
MAAISAAISGWCSSSCLSQSQRGLPSPARRRHFKVTAMAPKNKVNKYDDGWSKQWFGAGIFAEGSEEASVDVFKKLEKRKVLSSVEKAGLLSKAEELGVTLSSLEKLGLLSKAEDLGLLSLVESAATVSPAVLASLSLPLLVASIATVVFVPDDSTLLVTVQTVVATLFAAVAAGLFVGSVVLDGLQDD

SEQ ID NO: 49 - DNA, 29 bp, Artificial sequence
  primer
atagagctccacaatttctctccaatccc

SEQ ID NO: 50 - DNA, 30 bp, Artificial sequence
  primer
atacccgggctttaagcttctcaagagatg

SEQ ID NO: 51 - DNA, 20 bp, Artificial sequence
  primer
atggctgtcgtcggcgctcc

SEQ ID NO: 52 - DNA, 20 bp, Artificial sequence
  primer
tcagtcagcttcttgaagtc

SEQ ID NO: 53 - DNA, 29 bp, Artificial sequence
  primer
ataccatggcacaatttctctccaatccc

SEQ ID NO: 54 - DNA, 32 bp, Artificial sequence
  primer
atattaattaactttaagcttctcaagagatg

SEQ ID NO: 55 - DNA, 29 bp, Artificial sequence
  primer
ataggtacccacaatttctctccaatccc

SEQ ID NO: 56 - DNA, 30 bp, Artificial sequence
  primer
atagtcgacctttaagcttctcaagagatg

SEQ ID NO: 57 - protein, 195 aa, Artificial sequence
  consensus sequence
  Variant (2)..(12): Xaa in position 2 to 12 is any amino acid
  Variant (13)..(22): Xaa in position 13 to 22 is any or no amino acid
  Variant (24)..(26): Xaa in position 24 to 26 is any amino acid
  Variant (27)..(29): Xaa in position 27 to 29 is any or no amino acid
  Variant (31)..(33): Xaa in position 31 to 33 is any amino acid
  Variant (34)..(34): Xaa in position 34 is any or no amino acid
  Variant (36)..(39): Xaa in position 36 to 39 is any amino acid
  Variant (41)..(41): Xaa in position 41 is any amino acid
  Variant (46)..(46): Xaa in position 46 is any amino acid
  Variant (53)..(55): Xaa in position 53 to 55 is any amino acid
  Variant (57)..(57): Xaa in position 57 is any amino acid
  Variant (59)..(59): Xaa in position 59 is any amino acid
  Variant (61)..(61): Xaa in position 61 is any amino acid
  Variant (67)..(67): Xaa in position 67 is any amino acid
  Variant (73)..(74): Xaa in position 73 to 74 is any amino acid
  Variant (89)..(89): Xaa in position 89 is any amino acid
  Variant (101)..(101): Xaa in position 101 is any amino acid
  Variant (104)..(105): Xaa in position 104 to 105 is any amino acid
  Variant (109)..(109): Xaa in position 109 is any amino acid
  Variant (114)..(115): Xaa in position 114 to 115 is any amino acid
  Variant (120)..(120): Xaa in position 120 is any amino acid
  Variant (127)..(130): Xaa in position 127 to 130 is any amino acid
  Variant (132)..(133): Xaa in position 132 to 133 is any amino acid
  Variant (136)..(137): Xaa in position 136 to 137 is any amino acid
  Variant (141)..(142): Xaa in position 141 to 142 is any amino acid
  Variant (145)..(147): Xaa in position 145 to 147 is any amino acid
  Variant (153)..(153): Xaa in position 153 is any amino acid
  Variant (155)..(156): Xaa in position 155 to 156 is any amino acid
  Variant (161)..(162): Xaa in position 161 to 162 is any amino acid
  Variant (165)..(166): Xaa in position 165 to 166 is any amino acid
  Variant (170)..(170): Xaa in position 170 is any amino acid
  Variant (172)..(173): Xaa in position 172 to 173 is any amino acid
  Variant (175)..(177): Xaa in position 175 to 177 is any amino acid
  Variant (179)..(179): Xaa in position 179 is any amino acid
  Variant (189)..(189): Xaa in position 189 is any amino acid
  Variant (194)..(194): Xaa in position 194 is any amino acid
AXXXXXXXXXXXXXXXXXXXXXSXXXXXXPXXXXRXXXXVXAMAPXKKVNKYXXXWXKXWXGAGIFXEGSEEXXVDVFKKLEKRKVLSXVEKAGLLSKAEXLGXXLSSXEKLGXXSKAEXLGLLSLXXXXAXXSPXXLASXXLPXXXAAIAAXVXXPDDSXXLVXXQAVXAXXLXXXAXGLFVGSVVLXGLQEXD

SEQ ID NO: 58 - protein, 60 aa, Artificial sequence
  protein pattern
  Variant (3)..(3): Xaa in position 3 is any or no amino acid
  Variant (6)..(6): Xaa in position 6 is any or no amino acid
  Variant (9)..(9): Xaa in position 9 is Lys or Arg
  Variant (11)..(11): Xaa in position 11 is Asp or Asn
  Variant (12)..(12): Xaa in position 12 is Ala, Asp or Glu
  Variant (13)..(13): Xaa in position 13 is any amino acid
  Variant (15)..(15): Xaa in position 15 is any amino acid
  Variant (17)..(17): Xaa in position 17 is Glu or Gln
  Variant (19)..(19): Xaa in position 19 is Phe or Tyr
  Variant (23)..(23): Xaa in position 23 is Ile or Leu
  Variant (25)..(25): Xaa in position 25 is any amino acid
  Variant (30)..(30): Xaa in position 30 is any amino acid
  Variant (31)..(31): Xaa in position 31 is Ile or Val
  Variant (32)..(32): Xaa in position 32 is Glu, Asn or Ser
  Variant (39)..(39): Xaa in position 39 is Ile or Leu
  Variant (41)..(41): Xaa in position 41 is Lys or Arg
  Variant (47)..(47): Xaa in position 47 is Asn or Thr
  Variant (51)..(51): Xaa in position 51 is Ala or Ser
  Variant (56)..(56): Xaa in position 56 is Lys or Arg
  Variant (59)..(59): Xaa in position 59 is Asp, Glu, Gly or Gln
APXKKXVNXYXXXWXKXWXGAGXFXEGSEXXXVDVFKKXEXRKVLSXVEKXGLLSXAEXL

SEQ ID NO: 59 - protein, 29 aa, Artificial sequence
  protein pattern
  Variant (4)..(4): Xaa in position 4 is Leu or Val
  Variant (6)..(6): Xaa in position 6 is Ala or Gly
  Variant (7)..(7): Xaa in position 7 is Ala or Val
  Variant (9)..(9): Xaa in position 9 is Ala, Gly or Leu
  Variant (10)..(10): Xaa in position 10 is Ala, Leu or Val
  Variant (11)..(11): Xaa in position 11 is Ala, Gly or Thr
  Variant (12)..(12): Xaa in position 12 is Ala or Gly
  Variant (13)..(13): Xaa in position 13 is Ala or Val
  Variant (14)..(14): Xaa in position 14 is Gly or Val
  Variant (16)..(16): Xaa in position 16 is Phe or Leu
  Variant (23)..(23): Xaa in position 23 is any or no amino acid
  Variant (25)..(25): Xaa in position 25 is any or no amino acid
  Variant (29)..(29): Xaa in position 29 is Ala or Ser
QAVXAXXLXXXXXXLXVGSVVLXGXLQEX

SEQ ID NO: 60 - DNA, 1515 bp, Arabidopsis thaliana
  CDS (1)..(1515)
atggcaaaagcttgcctcttgcagtctactctactcccagcttactctccacttcacaaacttcgtaatcaaaacatcaccctctctttctcaccgcttccgctgtcccgatgccgtcccggaatccactgctcagtttcggccggtgagactacaatacaatccatggaggaagctccgaagatatcatggggatgcgagattgattcacttgagaacgctacttctcttcagaactggctctctgattcaggtctccctccgcagaaaatggctattgatagagtcgacatcggtgagcgaggcctcgtcgcttcacagaatctcagaaaaggagagaaattgctcttcgttcctccttctctcgtcatcagtgctgattccgaatggaccaacgcagaagctggtgaagtgatgaaacgttatgatgttccagattggcctttgctcgccacttatcttataagtgaagcaagtcttcagaaaagctcaagatggtttaactatatctcagctcttccccgacaaccttactcgcttttatactggactcggacagagcttgatatgtacttggaagcttctcagattcgagaacgggcaattgaaagaatcaccaatgttgttggaacttatgaagatctaagaagcaggatattttccaaacaccctcaacttttccctaaagaggttttcaatgatgagacatttaagtggtcttttggaatcctattctcacggttggtgcggttgccttctatggatggaagatttgccttagttccatgggcagatatgcttaatcataattgtgaggttgagacgttcctggattatgataaatcttcaaaaggagttgtctttacaacagatcgaccatatcaaccaggtgagcaggttttcatatcctatgggaataaatctaacggagagctattgttatcttatgggtttgttcccagagaaggaaccaatcctagtgattcagtagaactagcattatcacttaggaaaaacgataagtgttacgaggaaaagctggatgctttaaagaaacacggattatcgacacctcaatgctttcccgtaaggataacgggttggccaatggagctaatggcatatgcttatcttgtggtgagccctccagatatgagaaacaactttgaagagatggcgaaagctgcttcaaataagacatcaacaaagaatgatctaaaatatcctgaaatcgaggaagacgcattgcagttcatactggactcatgcgaaacaagcatatcaaagtacagccgatttctaaaggaaagtggatcaatggatttggacataacatctccaaaacagttgaaccgaaaagcgtttctgaaacagctagctgtagacttgtccactagtgagcgcaggatactgtaccgtgctcaatacattctgaggaggagactgagagatatcagaagtggtgagctgaaggctctacggctcttcagtggacttaggaacttcttcaagtga

SEQ ID NO: 61 - protein, 504 aa, Arabidopsis thaliana
MAKACLLQSTLLPAYSPLHKLRNQNITLSFSPLPLSRCRPGIHCSVSAGETTIQSMEEAPKISWGCEIDSLENATSLQNWLSDSGLPPQKMAIDRVDIGERGLVASQNLRKGEKLLFVPPSLVISADSEWTNAEAGEVMKRYDVPDWPLLATYLISEASLQKSSRWFNYISALPRQPYSLLYWTRTELDMYLEASQIRERAIERITNVVGTYEDLRSRIFSKHPQLFPKEVFNDETFKWSFGILFSRLVRLPSMDGRFALVPWADMLNHNCEVETFLDYDKSSKGVVFTTDRPYQPGEQVFISYGNKSNGELLLSYGFVPREGTNPSDSVELALSLRKNDKCYEEKLDALKKHGLSTPQCFPVRITGWPMELMAYAYLVVSPPDMRNNFEEMAKAASNKTSTKNDLKYPEIEEDALQFILDSCETSISKYSRFLKESGSMDLDITSPKQLNRKAFLKQLAVDLSTSERRILYRAQYILRRRLRDIRSGELKALRLFSGLRNFFK

SEQ ID NO: 62 - DNA, 1924 bp, glycine max
  CDS (67)..(1566)
  misc_feature (1905)..(1905): n is a, g, c or t
  misc_feature (1906)..(1906): n is a, g, c or t
tacctctcctgtaagcttcagttcagcagataaggtaatctcaaagctcgtcgtgttttcgcatcaatggccatggccatggctgaggcttcaagaatcacgttacactccactctcctccctttttttacccccaaaacccacgttggtcaccgccacttaagcctctcgtcatcacgcaagcaccaagtccagtgctcggtgtctgcaggcgcggcggctcagacgaacccagtggcttggggctgcgagattgactcgctggagaactcttcggctctgcagagatggctgtcggagtcggggcttccgccgcagaagatgggaatagagagagtggaggtgggagagagagggctggttgctttgaagaacattaggaaaggggagaaactactctttgtgcctccctcacttgtcattactccagattctgagtggagctgccccgaagctggtgaagtattgaaaaggaattcagtgccagattggcctttgcttgcaacttacctcataagtgaagctagcctcatggaatcttcaagatggagcaattatatatcagccttacctcgtcaaccttactcacttctttactggacgcaagcagaactagatcgctacttggaagcttcacaaattagggagagagcgattgaaaggattaataatgttattggaacatacaatgatttgaggctcagaatattttccaaataccctgatttattccctgatgaggtgttcaacatagagtccttcaaatggtcatttggtattcttttctcccgcttggttcggttaccctcaatgggtggaaatgttgccttggttccttgggctgatatgctgaatcatagttgtgatgtggagacatttttggattatgataagacatcaaagggaattgtcttcacgacagatcggccctatcaaccaggtgagcaggtatttatttcatatggaaaaaaatcaaatggggagcttttgttatcttatggatttgttccaaaggaaggcgctaatcctagtgattcagttgagttgtcactgtcactgaagaaatctgatgcgtcctataaggagaagttagagctgttgaagaattatggattatcagcatctcagtgttttcctatacagattactggttggcctttggaattaatggcttatgcttatttagctgttagtccttcaagcatgagaggagattttgaagagatggctgctgcagcatcaaataataccacctccaagaaggatttgagatatcctgaaatagaggagcaagcattgcaattcatactagatagttgtgaatccagcatatcaaaatacaacaagttcttacaggcaagtggatcactggatctggatgtgacttctcctaaacaactcaaccgaaggctctttctgaaacagctagctgtggacttgtgtactagtgagcgaaggatattatttcgtgctcaatacatactgcgaagaaaactgagggacatgagggctggtgaattaagggccctaaaaatattcaacggtttccggaatcttttccaatgaggccattcactggtgcattattttctgccctggtttgcccttggttgttttgaaaaaacctatctcacccttgagcatcatgaactttgttcaatggtaccacctaattgtgggaaacaggtccagtcttcagtttttattgatcaatatagaagaagcaagataagaaatagaaaaggtaaggaatgattgtaatataggcttgctatgtatttattgatccaaataaatttttcttttcctatgttaaattttcgatgaaaaaatcttctttggatcttctaaactcgatcctagttcaaatttttcttttcctaatgttaaaattttcgatgaaannaaatcttctttggatcaa

SEQ ID NO: 63 - protein, 499 aa, glycine max
MAMAMAEASRITLHSTLLPFFTPKTHVGHRHLSLSSSRKHQVQCSVSAGAAAQTNPVAWGCEIDSLENSSALQRWLSESGLPPQKMGIERVEVGERGLVALKNIRKGEKLLFVPPSLVITPDSEWSCPEAGEVLKRNSVPDWPLLATYLISEASLMESSRWSNYISALPRQPYSLLYWTQAELDRYLEASQIRERAIERINNVIGTYNDLRLRIFSKYPDLFPDEVFNIESFKWSFGILFSRLVRLPSMGGNVALVPWADMLNHSCDVETFLDYDKTSKGIVFTTDRPYQPGEQVFISYGKKSNGELLLSYGFVPKEGANPSDSVELSLSLKKSDASYKEKLELLKNYGLSASQCFPIQITGWPLELMAYAYLAVSPSSMRGDFEEMAAAASNNTTSKKDLRYPEIEEQALQFILDSCESSISKYNKFLQASGSLDLDVTSPKQLNRRLFLKQLAVDLCTSERRILFRAQYILRRKLRDMRAGELRALKIFNGFRNLFQ

SEQ ID NO: 64 - DNA, 1545 bp, Arabidopsis thaliana
  CDS (1)..(1545)
atggaaggggttatcacatgtttccatacgaaatgcgtctctcttccaattcgttctttcccactttctagggtttcttcacttcctcggtggaggaacaataaattgatctcttcatcgcgatcggttcatctaagaagcttgtgcgtttcgagctcagatactttagtcgcgagcggttcaccaaaggaagacgagaggcagagcaaagtatcgagcaagaaggaaggagatgactccgaggatttgaagttttggatggataagaatgggttgccaccttgcaaggttattctcaaggagagaccagctcatgatcagaagcataaacctatacattatgttgctgctagtgaggatcttcagaagggtgatgtggcgttttcagttcctgattctctggtggttactctggaaagagttttgggaaacgagactattgctgaactgttgacgacgaacaaattatccgaactggcttgtctagctttgtatttgatgtatgagaagaaacaaggaaagaaatcagtatggtatccctatataagagaacttgatcgtcaaagaggaagaggtcagttagatgcggaatcccctttgctgtggtcagaggctgagttagattacctaactggtagtcctaccaaggccgaagttcttgagagggctgaagggatcaaaagagaatacaatgagcttgacactgtctggttcatggctggatctttgtttcagcaatacccatttgacataccaactgaagctttttcatttgagattttcaaacaggcatttgttgccattcagtcatgtgtggtgcatttacaaaatgtcggtttggctcgtcggtttgctttggttcctcttggtcctcccttgttggcctattgttccaactgcaaggcaatgcttactgctgttgatggtgctgttgaactcgtggtagataggccatataaggccggggatcctatagttgtctggtgtgggccacaaccaaatgcgaaattgcttctgaactatggatttgttgatgaggataacccttatgatagagtaatagttgaggcagcgttgaacactgaggatcctcaataccaggacaagagaatggttgctcaaaggaacggaaaattatcccaacaagtatttcaggttcgtgtgggaaaagaaagagaagctgttcaagacatgcttccctacctgcggttgggttacatgtctgatccttctgaaatgcagtcagtaatttcatcccaaggtccagtttgtccgatgagcccttgtatggaaagagcagtactagatcagcttgctaattacttcatgagacggttatctggctaccctactactccgaaagaagatgatgcattgttggcagatcctagtttgagtcctaggaagcgagttgcaacccggcttgtccaactggagaagaaaatactagttgcatgccttacgacaacagttgatcttttaaatcagttgcccgatacagccatctctccatgcccagcaccatatgctccttccttgaaataa

SEQ ID NO: 65 - protein, 514 aa, Arabidopsis thaliana
MEGVITCFHTKCVSLPIRSFPLSRVSSLPRWRNNKLISSSRSVHLRSLCVSSSDTLVASGSPKEDERQSKVSSKKEGDDSEDLKFWMDKNGLPPCKVILKERPAHDQKHKPIHYVAASEDLQKGDVAFSVPDSLVVTLERVLGNETIAELLTTNKLSELACLALYLMYEKKQGKKSVWYPYIRELDRQRGRGQLDAESPLLWSEAELDYLTGSPTKAEVLERAEGIKREYNELDTVWFMAGSLFQQYPFDIPTEAFSFEIFKQAFVAIQSCVVHLQNVGLARRFALVPLGPPLLAYCSNCKAMLTAVDGAVELVVDRPYKAGDPIVVWCGPQPNAKLLLNYGFVDEDNPYDRVIVEAALNTEDPQYQDKRMVAQRNGKLSQQVFQVRVGKEREAVQDMLPYLRLGYMSDPSEMQSVISSQGPVCPMSPCMERAVLDQLANYFMRRLSGYPTTPKEDDALLADPSLSPRKRVATRLVQLEKKILVACLTTTVDLLNQLPDTAISPCPAPYAPSLK

SEQ ID NO: 66 - DNA, 1509 bp, Oryza sativa (japonica cultivar-group)
  CDS (1)..(1509)
atggccaccgccgcggcgctcgcgctccacacgcagttccggccgccgcgctcgcctcgccgtctccggcagcatctagccttaccctcaggagtcctcatccgatcccccgtccgcgcctcggctgcgtcggcgtcggcgtcggcgccggcgcagcgggaggccgccgccgcgggagtcccgtggggctgcgagatcgagtccctggagagcgccgtgtcgctggagaggtggctcaccgattcggggctccccgagcagaggttggggatacagcgggtggacgtcggtgagcgcggcctcgtcgcgctgaagaacatccgcaagggggagaagctgctcttcgtgcctccctccctcgtcattacagctgactcagaatggggctgccctgaggtggggaatgtgttgaagagaaattctgtgccggattggccgcttattgctacctaccttataagcgaagctagtttagagagttcgtcgaggtggagcagctacatagcggcgttgccaaggcagccttactctctgttgtactggactaggcctgagcttgatgcatacttggtggcttcgccgatcagggaacgcgcaattcagaggatcactgatgtggtcggaacatacaatgatctccgtgacagaatattttctaagcattcagatttgttccctgaggaggtttacaacttagagacgtttagatggtccttcggcatcctcttctcacgcctggttcgattgccatcaatggatggaagggttgcactagttccttgggcagatatgcttaaccatagtcctgaggtggaaacattcttggattatgataaatcctcagggggaatagttttcactaccgatcgttcatatcaaccaggtgagcaggtgtttatatcctatggcaagaaatccagtggcgagctattgctttcatatggttttgttccaaaagagggaacaaacccaaatgattcagttgaattgctggtgtctcttaataagtctgataagtgctacaaagagaagctacaagcactaaaaagaaatggattgtcagagtttgaaagtttccctttacgcgtcacaggatggccagttgagttgatggcttatgcctttcttgtggtcagccctcccgagatgagccaacgttttgaagagatggctgtcgctgcatcaaataaaagtccatccaagcctggacttaattatcctgaactggaggaacaagctcttcagtttatcttggactgttgtgagtctaacatagcaaaatacacaaagttcctagagggtagcagtgggtctctgcaactttcaaccaattcaaagcaagccaaccggacgttactgctaaaacaactagcaagagatctttgcattagtgaacggagaatcctgtatcgtacacaatatatattgcgtaggagactgagggacatgagaggtggtgaacttaaagctctgtcattgttcaatgggctcagaaagctcttcaaataa

SEQ ID NO: 67 - protein, 502 aa, Oryza sativa (japonica cultivar-group)
MATAAALALHTQFRPPRSPRRLRQHLALPSGVLIRSPVRASAASASASAPAQREAAAAGVPWGCEIESLESAVSLERWLTDSGLPEQRLGIQRVDVGERGLVALKNIRKGEKLLFVPPSLVITADSEWGCPEVGNVLKRNSVPDWPLIATYLISEASLESSSRWSSYIAALPRQPYSLLYWTRPELDAYLVASPIRERAIQRITDVVGTYNDLRDRIFSKHSDLFPEEVYNLETFRWSFGILFSRLVRLPSMDGRVALVPWADMLNHSPEVETFLDYDKSSGGIVFTTDRSYQPGEQVFISYGKKSSGELLLSYGFVPKEGTNPNDSVELLVSLNKSDKCYKEKLQALKRNGLSEFESFPLRVTGWPVELMAYAFLVVSPPEMSQRFEEMAVAASNKSPSKPGLNYPELEEQALQFILDCCESNIAKYTKFLEGSSGSLQLSTNSKQANRTLLLKQLARDLCISERRILYRTQYILRRRLRDMRGGELKALSLFNGLRKLFK

SEQ ID NO: 68 - DNA, 1545 bp, Arabidopsis thaliana
  CDS (1)..(1545)
atggaaggggttatcacatgtttccatacgaaatgcgtctctcttccaattcgttctttcccactttctagggtttcttcacttcctcggtggaggaacaataaattgatctcttcatcgcgatcggttcatctaagaagcttgtgcgtttcgagctcagatactttagtcgcgagcggttcaccaaaggaagacgagaggcagagcaaagtatcgagcaagaaggaaggagatgactccgaggatttgaagttttggatggataagaatgggttgccaccttgcaaggttattctcaaggagagaccagctcatgatcagaagcataaacctatacattatgttgctgctagtgaggatcttcagaagggtgatgtggcgttttcagttcctgattctctggtggttactctggaaagagttttgggaaacgagactattgctgaactgttgacgacgaacaaattatccgaactggcttgtctagctttgtatttgatgtatgagaagaaacaaggaaagaaatcagtatggtatccctatataagagaacttgatcgtcaaagaggaagaggtcagttagatgcggaatcccctttgctgtggtcagaggctgagttagattacctaactggtagtcctaccaaggccgaagttcttgagagggctgaagggatcaaaagagaatacaatgagcttgacactgtctggttcatggctggatctttgtttcagcaatacccatttgacataccaactgaagctttttcatttgagattttcaaacaggcatttgttgccattcagtcatgtgtggtgcatttacaaaatgtcggtttggctcgtcggtttgctttggttcctcttggtcctcccttgttggcctattgttccaactgcaaggcaatgcttactgctgttgatggtgctgttgaactcgtggtagataggccatataaggccggggatcctatagttgtctggtgtgggccacaaccaaatgcgaaattgcttctgaactatggatttgttgatgaggataacccttatgatagagtaatagttgaggcagcgttgaacactgagggtcctcaataccaggacaagagaatggttgctcaaaggaacggaaaattatcccaacaagtatttcaggttcgtgtgggaaaagaaagagaagctgttcaagacatgcttccctacctgcggttgggttacatgtctgatccttctgaaatgcagtcagtaatttcatcccaaggtccagtttgtccgatgagcccttgtatggaaagagcagtactagatcagcttgctaattacttcatgagacggttatctggctaccctactactccgaaagaagatgatgcattgttggcagatcctagtttgagtcctaggaagcgagttgcaacccggcttgtccaactggagaagaaaatactagttgcatgccttacgacaacagttgatcttttaaatcagttgcccgatacagccatctctccatgcccagcaccatatgctccttccttgaaataa

SEQ ID NO: 69 - protein, 514 aa, Arabidopsis thaliana
MEGVITCFHTKCVSLPIRSFPLSRVSSLPRWRNNKLISSSRSVHLRSLCVSSSDTLVASGSPKEDERQSKVSSKKEGDDSEDLKFWMDKNGLPPCKVILKERPAHDQKHKPIHYVAASEDLQKGDVAFSVPDSLVVTLERVLGNETIAELLTTNKLSELACLALYLMYEKKQGKKSVWYPYIRELDRQRGRGQLDAESPLLWSEAELDYLTGSPTKAEVLERAEGIKREYNELDTVWFMAGSLFQQYPFDIPTEAFSFEIFKQAFVAIQSCVVHLQNVGLARRFALVPLGPPLLAYCSNCKAMLTAVDGAVELVVDRPYKAGDPIVVWCGPQPNAKLLLNYGFVDEDNPYDRVIVEAALNTEGPQYQDKRMVAQRNGKLSQQVFQVRVGKEREAVQDMLPYLRLGYMSDPSEMQSVISSQGPVCPMSPCMERAVLDQLANYFMRRLSGYPTTPKEDDALLADPSLSPRKRVATRLVQLEKKILVACLTTTVDLLNQLPDTAISPCPAPYAPSLK

SEQ ID NO: 70 - DNA, 1614 bp, Arabidopsis thaliana
  CDS (1)..(1614)
atggaaggggttatcacatgtttccatacgaaatgcgtctctcttccaattcgttctttcccactttctagggtttcttcacttcctcggtggaggaacaataaattgatctcttcatcgcgatcggttcatctaagaagcttgtgcgtttcgagctcagatactttagtcgcgagcggttcaccaaaggaagacgagaggcagagcaaagtatcgagcaagaaggaaggagatgactccgaggatttgaagttttggatggataagaatgggttgccaccttgcaaggttattctcaaggagagaccagctcatgatcagaagcataaacctatacattatgttgctgctagtgaggatcttcagaagggtgatgtggcgttttcagttcctgattctctggtggttactctggaaagagttttgggaaacgagactattgctgaactgttgacgacgaacaaattatccgaactggcttgtctagctttgtatttgatgtatgagaagaaacaaggaaagaaatcagtatggtatccctatataagagaacttgatcgtcaaagaggaagaggtcagttagatgcggaatcccctttgctgtggtcagaggctgagttagattacctaactggtagtcctaccaaggccgaagttcttgagagggctgaagggatcaaaagagaatacaatgagcttgacactgtctggttcatggctggatctttgtttcagcaatacccatttgacataccaactgaagctttttcatttgagattttcaaacaggcatttgttgccattcagtcatgtgtggtgcatttacaagtggtgcttgttgcttcttctaatttagattgttatgcttcttcttgtactcagaatgtcggtttggctcgtcggtttgctttggttcctcttggtcctcccttgttggcctattgttccaactgcaaggcaatgcttactgctgttgatggtgctgttgaactcgtggtagataggccatataaggccggggatcctatagttgtctggtgtgggccacaaccaaatgcgaaattgcttctgaactatggatttgttgatgaggataacccttatgatagagtaatagttgaggcagcgttgaacactgaggatcctcaataccaggacaagagaatggttgctcaaaggaacggaaaattatcccaacaagtatttcaggttcgtgtgggaaaagaaagagaagctgttcaagacatgcttccctacctgcggttgggttacatgtctgatccttctgaaatgcagtcagtaatttcatcccaaggtccagtttgtccgatgagcccttgtatggaaagagcagtactagatcagcttgctaattacttcatgagacggttatctggctaccctactactccgaaagaagatgatgcattggaagcgagttgcaacccggcttgtccaactggagaagaaaatactagttgcatgccttacgacaacagttcgtgttgtagctgcaatttgtgggacatggcaggagtaatttttggtcgtgtccttgatcattacaatctgaggtcgcttaactacggtcagtttttgtgtgtacaagtctag

SEQ ID NO: 71 - protein, 537 aa, Arabidopsis thaliana
MEGVITCFHTKCVSLPIRSFPLSRVSSLPRWRNNKLISSSRSVHLRSLCVSSSDTLVASGSPKEDERQSKVSSKKEGDDSEDLKFWMDKNGLPPCKVILKERPAHDQKHKPIHYVAASEDLQKGDVAFSVPDSLVVTLERVLGNETIAELLTTNKLSELACLALYLMYEKKQGKKSVWYPYIRELDRQRGRGQLDAESPLLWSEAELDYLTGSPTKAEVLERAEGIKREYNELDTVWFMAGSLFQQYPFDIPTEAFSFEIFKQAFVAIQSCVVHLQVVLVASSNLDCYASSCTQNVGLARRFALVPLGPPLLAYCSNCKAMLTAVDGAVELVVDRPYKAGDPIVVWCGPQPNAKLLLNYGFVDEDNPYDRVIVEAALNTEDPQYQDKRMVAQRNGKLSQQVFQVRVGKEREAVQDMLPYLRLGYMSDPSEMQSVISSQGPVCPMSPCMERAVLDQLANYFMRRLSGYPTTPKEDDALEASCNPACPTGEENTSCMPYDNSSCCSCNLWDMAGVIFGRVLDHYNLRSLNYGQFLCVQV

SEQ ID NO: 72 - DNA, 1521 bp, Brassica napus
  CDS (1)..(1521)
atggcgaaagcttcgaactttctacagtcaaccctcctcccatcctcctcccccctccgcaacctccgcacccaacctctaaccctctccttcccacctctcccctcgtcccgacaccgtcccataatccactgctccgtcttcgccggcgagaccacgaaacgatccgcggaggaagccccggacatctcatggggctgcgagatagactcagtagagaacgccacttctctccagagatggctctcggactcaggcctcccgccgcagaagatggccatcgacaaggtcgacatcggagagagagggctcgtcgcgtctcagaatctcagaaagggagagaagctcctcttcgttcctccttccctcgtcatcagtgctgattccgtgtggaccaatggcgaggctggcgaagtgatgaagtgttacgatgttccggattggcctttgctggcgagttatcttataagtgaagcgagtcttcagaagggttcgagatggtttaactatatctcggctcttcccagacagccttactcgcttttatactggactcggacagagcttgatatgtacttggaagcttcacagattcgagaacgggcaatcgaaagaatcactaatgttgttggaacttatgaagatttaagaagcaggatattttccaaacaccctaatcttttccctaaagaggttttcaatgatgagacgtttaagtggtctttcggaatcctattctcacgcttggttcggttgccatctatggatggaagatttgccttagttccatgggcagacatgcttaatcacaactgtgaggttgagacttacctggattatgataagtcttcaaaaggagttgtctttacagcagatcgaccatatcaaccaggtgagcaagtcttcatatcgtatgggaacaaatcaaacggagagctgctgctatcatatgggtttgttcccagagaaggaactaatcccagtgattcagtggagctggcaatgtccctcaggaaaaacgacacgtgttacaaggaaaagcttgatgctctaaagaaacatggattatccacgcctcaatgcttcccggtaagaatcactgggtggccattggagttgatggcgtatgcttacctagttgtgagccctccagatatgagtaacagctttgaagagatggcgaaagctgcttcgaataagtcatcaacgaataaggatctaaagtatcctgaaatcgaggaagaagcattgcagttcatactggattcatgtgaaacaagcatatcaaagtacagcagatttttaaaagaaagtggatcaatggatttggacataacatctccaaaacagttgaaccgaaaagcgtttctgaaacagctagctgtagacttgtccaccagcgagcgtaggatactgtaccgtgctcaatacattctgaggaggagactgagagatataagaagcggtgagctgaaagctctaaggctttttagtggaattagaaacttcttcaagcagtga

SEQ ID NO: 73 - protein, 506 aa, Brassica napus
MAKASNFLQSTLLPSSSPLRNLRTQPLTLSFPPLPSSRHRPIIHCSVFAGETTKRSAEEAPDISWGCEIDSVENATSLQRWLSDSGLPPQKMAIDKVDIGERGLVASQNLRKGEKLLFVPPSLVISADSVWTNGEAGEVMKCYDVPDWPLLASYLISEASLQKGSRWFNYISALPRQPYSLLYWTRTELDMYLEASQIRERAIERITNVVGTYEDLRSRIFSKHPNLFPKEVFNDETFKWSFGILFSRLVRLPSMDGRFALVPWADMLNHNCEVETYLDYDKSSKGVVFTADRPYQPGEQVFISYGNKSNGELLLSYGFVPREGTNPSDSVELAMSLRKNDTCYKEKLDALKKHGLSTPQCFPVRITGWPLELMAYAYLVVSPPDMSNSFEEMAKAASNKSSTNKDLKYPEIEEEALQFILDSCETSISKYSRFLKESGSMDLDITSPKQLNRKAFLKQLAVDLSTSERRILYRAQYILRRRLRDIRSGELKALRLFSGIRNFFKQ

SEQ ID NO: 74 - DNA, 1901 bp, Hordeum vulgare
  CDS (25)..(1548)
cgtccccactttcgcggcttcgccatggccacctctaccaccaccgccaccgctctccacccccagttccggccgccgtcgcacccgtgcgcacctcgtcggctccgcccctgcccctcctcctcctccagcgtccgaccccgcttctccgtccgcgccgcagcggcgtcggcgtccgcgtccgctccggtgcagcgcgaggccgtctcgggcgtcccatggggctgcgagatcgagtccctggagagcgcggcgtcgctggaacggtggctcaccgcgtcgggtctccccgagcagcgtctggccctagagaaggtggacatcggcgagcgcggcctcgtcgcgctcaagaacgtccggaatggagagaagctgctcttcgtgcccccgaccctcgtcatcaccgctgattcggaatggaccaaccgtgaggtcggggatgtgatgaagaggtactctgtgccggactggccgcttctcgccacctacctcataagcgaagccagcttggagggttcgtcgaggtggagcagctacatagacgcattgcctaggcagccttactcgcttctgtactggactcgcactgagatagatgcatacttggtggcttccccaatcagggaacgggcaatctcaaggatcagtgatgtgattgggacatacaacgaccttcgagatcgaatattttctaaacatccagatttgttccctgagaaggtatacaacatggagaactttagatggtccttcggcattctcttctcacgtctggttcgtttagaatcaatgggcggaaaggttgcactagttccttgggcagatatgcttaaccatagccctgaggtagatgcattcttggattatgacaagtcatcccaaggaatagtcttcaccactgatcgttcatatcaaccaggtgagcaggtgtttatatcctatgggaagaaatccagtggtgagctattgctttcctatggttttgtaccaaaagagggcacaaatccaaatgattcagttgaattcttggtgtctcttaaaaaatctgatgagtgctacaaagaaaaattacaagcactaaagaaacacggtttgtcagaatctgaaagtttccccttgagggtcacagggtggccagttgagctgatggcttatgccttcctcgtagtcagtcctcctgagatgattcaacgctttgaggagatggctgttgctgcatccaataagggttcctccaagcctgcagttaattatcccgagttggacgagcaggctcttcagtttatcttggactgttgtgaatctagtataaaaagatataccaagtacctagagggcgccaagggttctgcggaagtctccatcaatacaaagcaggccaacaggaccttgctactgaaacagctagcaagagatctgtgcatcagtgaacggaggatcctatatcgttcgcaatacatactgcgtaggagattgagggacatgagggccggtggtgagcttaaagctctgtcattattcaatggtctcagaaatctcttcaaataaacggacggggtatatgttgtgccccctgaagatttctaggagcaatgctggtgtgtctccatcgacttggtgtttgcctgccaaggcatattgcagtatcaggctaagatcttctccggagttgcaactgaatagtaggaaaaactcacaaaaggttgatgtgaaaccaaaaaaatagctgcagttgtgattgaacagccctgagcttggcatacgtgtatatgtgatctagggtgctgcagcgcatctgtttgtcttttcttttgggcatctagaatttattatccatgtaaaattcttctacgagtagtactttttgtttggggtcgcctgtacccaaaaaaaaaaaaaaa

SEQ ID NO: 75 - protein, 507 aa, Hordeum vulgare
MATSTTTATALHPQFRPPSHPCAPRRLRPCPSSSSSVRPRFSVRAAAASASASAPVQREAVSGVPWGCEIESLESAASLERWLTASGLPEQRLALEKVDIGERGLVALKNVRNGEKLLFVPPTLVITADSEWTNREVGDVMKRYSVPDWPLLATYLISEASLEGSSRWSSYIDALPRQPYSLLYWTRTEIDAYLVASPIRERAISRISDVIGTYNDLRDRIFSKHPDLFPEKVYNMENFRWSFGILFSRLVRLESMGGKVALVPWADMLNHSPEVDAFLDYDKSSQGIVFTTDRSYQPGEQVFISYGKKSSGELLLSYGFVPKEGTNPNDSVEFLVSLKKSDECYKEKLQALKKHGLSESESFPLRVTGWPVELMAYAFLVVSPPEMIQRFEEMAVAASNKGSSKPAVNYPELDEQALQFILDCCESSIKRYTKYLEGAKGSAEVSINTKQANRTLLLKQLARDLCISERRILYRSQYILRRRLRDMRAGGELKALSLFNGLRNLFK

SEQ ID NO: 76 - DNA, 29 bp, Artificial sequence
  primer
atagagctcacttcacaaacttcgtaatc

SEQ ID NO: 77 - DNA, 33 bp, Artificial sequence
  primer
atacccgggaagagcaatttctctccttttctg

SEQ ID NO: 78 - DNA, 21 bp, Artificial sequence
  primer
atggcaaaagcttgcctcttg

SEQ ID NO: 79 - DNA, 23 bp, Artificial sequence
  primer
tcacttgaagaagttcctaagtc

SEQ ID NO: 80 - DNA, 29 bp, Artificial sequence
  primer
ataccatggacttcacaaacttcgtaatc

SEQ ID NO: 81 - DNA, 35 bp, Artificial sequence
  primer
atattaattaaaagagcaatttctctccttttctg

SEQ ID NO: 82 - DNA, 29 bp, Artificial sequence
  primer
ataggtaccacttcacaaacttcgtaatc

SEQ ID NO: 83 - DNA, 33 bp, Artificial sequence
  primer
atagtcgacaagagcaatttctctccttttctg

SEQ ID NO: 84 - protein, 533 aa, Artificial sequence
  consensus sequence
  Variant (2)..(6): Xaa in position 2 to 6 is any amino acid
  Variant (8)..(14): Xaa in position 8 to 14 is any amino acid
  Variant (15)..(17): Xaa in position 15 to 17 is any or no amino acid
  Variant (19)..(24): Xaa in position 19 to 24 is any amino acid
  Variant (26)..(37): Xaa in position 26 to 37 is any amino acid
  Variant (38)..(43): Xaa in position 38 to 43 is any or no amino acid
  Variant (45)..(67): Xaa in position 45 to 67 is any amino acid
  Variant (68)..(72): Xaa in position 68 to 72 is any or no amino acid
  Variant (74)..(75): Xaa in position 74 to 75 is any amino acid
  Variant (77)..(80): Xaa in position 77 to 80 is any amino acid
  Variant (84)..(100): Xaa in position 84 to 100 is any amino acid
  Variant (101)..(106): Xaa in position 101 to 106 is any or no amino acid
  Variant (108)..(112): Xaa in position 108 to 112 is any amino acid
  Variant (115)..(119): Xaa in position 115 to 119 is any amino acid
  Variant (122)..(122): Xaa in position 122 is any amino acid
  Variant (126)..(151): Xaa in position 126 to 151 is any amino acid
  Variant (154)..(154): Xaa in position 154 is any amino acid
  Variant (157)..(158): Xaa in position 157 to 158 is any amino acid
  Variant (160)..(165): Xaa in position 160 to 165 is any amino acid
  Variant (167)..(167): Xaa in position 167 is any amino acid
  Variant (169)..(170): Xaa in position 169 to 170 is any amino acid
  Variant (173)..(174): Xaa in position 173 to 174 is any amino acid
  Variant (176)..(176): Xaa in position 176 is any amino acid
  Variant (179)..(180): Xaa in position 179 to 180 is any amino acid
  Variant (181)..(187): Xaa in position 181 to 187 is any or no amino acid
  Variant (189)..(189): Xaa in position 189 is any amino acid
  Variant (191)..(191): Xaa in position 191 is any amino acid
  Variant (193)..(195): Xaa in position 193 to 195 is any amino acid
  Variant (199)..(199): Xaa in position 199 is any amino acid
  Variant (202)..(203): Xaa in position 202 to 203 is any amino acid
  Variant (205)..(212): Xaa in position 205 to 212 is any amino acid
  Variant (214)..(220): Xaa in position 214 to 220 is any amino acid
  Variant (222)..(223): Xaa in position 222 to 223 is any amino acid
  Variant (225)..(228): Xaa in position 225 to 228 is any amino acid
  Variant (229)..(234): Xaa in position 229 to 234 is any or no amino acid
  Variant (236)..(238): Xaa in position 236 to 238 is any amino acid
  Variant (240)..(242): Xaa in position 240 to 242 is any amino acid
  Variant (244)..(244): Xaa in position 244 is any amino acid
  Variant (246)..(249): Xaa in position 246 to 249 is any amino acid
  Variant (251)..(251): Xaa in position 251 is any amino acid
  Variant (253)..(255): Xaa in position 253 to 255 is any amino acid
  Variant (257)..(260): Xaa in position 257 to 260 is any amino acid
  Variant (262)..(263): Xaa in position 262 to 263 is any amino acid
  Variant (265)..(265): Xaa in position 265 is any amino acid
  Variant (267)..(273): Xaa in position 267 to 273 is any amino acid
  Variant (274)..(293): Xaa in position 274 to 293 is any or no amino acid
  Variant (298)..(301): Xaa in position 298 to 301 is any amino acid
  Variant (302)..(302): Xaa in position 302 is any or no amino acid
  Variant (304)..(312): Xaa in position 304 to 312 is any amino acid
  Variant (314)..(324): Xaa in position 314 to 324 is any amino acid
  Variant (325)..(326): Xaa in position 325 to 326 is any or no amino acid
  Variant (329)..(329): Xaa in position 329 is any amino acid
  Variant (331)..(332): Xaa in position 331 to 332 is any amino acid
  Variant (334)..(340): Xaa in position 334 to 340 is any amino acid
  Variant (342)..(347): Xaa in position 342 to 347 is any amino acid
  Variant (351)..(351): Xaa in position 351 is any amino acid
  Variant (356)..(358): Xaa in position 356 to 358 is any amino acid
  Variant (359)..(360): Xaa in position 359 to 360 is any or no amino acid
  Variant (363)..(363): Xaa in position 363 is any amino acid
  Variant (365)..(365): Xaa in position 365 is any amino acid
  Variant (367)..(371): Xaa in position 367 to 371 is any amino acid
  Variant (373)..(375): Xaa in position 373 to 375 is any amino acid
  Variant (377)..(378): Xaa in position 377 to 378 is any amino acid
  Variant (380)..(381): Xaa in position 380 to 381 is any amino acid
  Variant (383)..(389): Xaa in position 383 to 389 is any amino acid
  Variant (391)..(396): Xaa in position 391 to 396 is any amino acid
  Variant (398)..(399): Xaa in position 398 to 399 is any amino acid
  Variant (401)..(411): Xaa in position 401 to 411 is any amino acid
  Variant (412)..(413): Xaa in position 412 to 413 is any or no amino acid
  Variant (415)..(426): Xaa in position 415 to 426 is any amino acid
  Variant (429)..(432): Xaa in position 429 to 432 is any amino acid
  Variant (434)..(442): Xaa in position 434 to 442 is any amino acid
  Variant (443)..(444): Xaa in position 443 to 444 is any or no amino acid
  Variant (446)..(447): Xaa in position 446 to 447 is any amino acid
  Variant (449)..(451): Xaa in position 449 to 451 is any amino acid
  Variant (453)..(465): Xaa in position 453 to 465 is any amino acid
  Variant (467)..(491): Xaa in position 467 to 491 is any amino acid
  Variant (492)..(492): Xaa in position 492 is any or no amino acid
  Variant (494)..(494): Xaa in position 494 is any amino acid
  Variant (497)..(527): Xaa in position 497 to 527 is any amino acid
  Variant (528)..(529): Xaa in position 528 to 529 is any or no amino acid
  Variant (531)..(532): Xaa in position 531 to 532 is any amino acid
LXXXXXPXXXXXXXXXXRXXXXXXSXXXXXXXXXXXXXXXXXXAXXXXXXXXXXXXXXXXXXXXXXXXXXXXLXXWXXXXGLPXXXXXXXXXXXXXXXXXXXXXXXAXXXXXKGXXXXXVPXSLVXXXXXXXXXXXXXXXXXXXXXXXXXXLAXYLXXEXXXXXXSXWXXYIXXLXRQXXXXXXXXXSXLXWXXXELDXYLXXSXXXXXXXXRXXXXXXXYXXLXXXXXXXXXXFXXXPXXXPXEXXXXEXFXXXFXXXXSXXVXLXXXXXXXXXXXXXXXXXXXXXXXXXXXALVPXXXXXLXXXXXXXXXLXXXXXXXXXXXXXDRXYXXGXXXXXXXGXXXXXXLLLXYGFVXXXXXNPXDXVXXXXXLXXXDXXYXXKXXXXXXXGXXXXXXFXXRXXXXXXXXXXXXXLXXXXXXXXXXXXEMXXXXSXXXXXXXXXXXPXXEXXXLXXXXXXXXXXXXXYXXXXXXXXXXXXXXXXXXXXXXXXXXLXQLXXXXXXXXXXXXXXXXXXXXXXXXXXXXXXXXXAXXL

SEQ ID NO: 85 - protein, 25 aa, Artificial sequence
  protein pattern
  Variant (2)..(3): Xaa in position 2 to 3 is any amino acid
  Variant (4)..(4): Xaa in position 4 is any or no amino acid
  Variant (6)..(8): Xaa in position 6 to 8 is any amino acid
  Variant (9)..(9): Xaa in position 9 is any or no amino acid
  Variant (11)..(12): Xaa in position 11 to 12 is any amino acid
  Variant (13)..(13): Xaa in position 13 is Pro or Ser
  Variant (14)..(14): Xaa in position 14 is Asn or Ser
  Variant (15)..(15): Xaa in position 15 is Ala or Gly
  Variant (16)..(16): Xaa in position 16 is Glu or Lys
  Variant (20)..(20): Xaa in position 20 is Asn or Ser
  Variant (25)..(25): Xaa in position 25 is Asp or Pro
GXXXVXXXXGXXXXXXLLLXYGFVX

SEQ ID NO: 86 - protein, 60 aa, Artificial sequence
  protein pattern
  Variant (4)..(5): Xaa in position 4 to 5 is any or no amino acid
  Variant (7)..(7): Xaa in position 7 is any amino acid
  Variant (9)..(10): Xaa in position 9 to 10 is any amino acid
  Variant (11)..(11): Xaa in position 11 is Asp or Asn
  Variant (12)..(12): Xaa in position 12 is any amino acid
  Variant (13)..(13): Xaa in position 13 is Ile, Leu or Val
  Variant (14)..(14): Xaa in position 14 is Asp or Gly
  Variant (16)..(18): Xaa in position 16 to 18 is any amino acid
  Variant (19)..(19): Xaa in position 19 is Leu or Met
  Variant (20)..(21): Xaa in position 20 to 21 is any amino acid
  Variant (22)..(22): Xaa in position 22 is Arg or Ser
  Variant (23)..(23): Xaa in position 23 is Ile or Leu
  Variant (25)..(25): Xaa in position 25 is Gln or Ser
  Variant (26)..(26): Xaa in position 26 is any amino acid
  Variant (27)..(27): Xaa in position 27 is His or Tyr
  Variant (29)..(30): Xaa in position 29 to 30 is any amino acid
  Variant (31)..(31): Xaa in position 31 is Phe or Ile
  Variant (33)..(33): Xaa in position 33 is any amino acid
  Variant (34)..(34): Xaa in position 34 is Glu or Lys
  Variant (35)..(35): Xaa in position 35 is Ala or Val
  Variant (36)..(36): Xaa in position 36 is Phe or Tyr
  Variant (37)..(37): Xaa in position 37 is Asn or Ser
  Variant (38)..(38): Xaa in position 38 is any amino acid
  Variant (40)..(40): Xaa in position 40 is any amino acid
  Variant (42)..(42): Xaa in position 42 is Lys or Arg
  Variant (43)..(43): Xaa in position 43 is any amino acid
  Variant (44)..(44): Xaa in position 44 is Ala or Ser
  Variant (46)..(46): Xaa in position 46 is Gly or Val
  Variant (47)..(47): Xaa in position 47 is Ala or Ile
  Variant (48)..(48): Xaa in position 48 is Ile or Leu
  Variant (49)..(49): Xaa in position 49 is any amino acid
  Variant (51)..(51): Xaa in position 51 is any amino acid
  Variant (52)..(52): Xaa in position 52 is Leu or Val
  Variant (54)..(54): Xaa in position 54 is His or Arg
  Variant (56)..(56): Xaa in position 56 is Glu, Pro or Gln
  Variant (57)..(57): Xaa in position 57 is Asn, Ser or Val
  Variant (58)..(58): Xaa in position 58 is Met or Val
  Variant (59)..(59): Xaa in position 59 is any amino acid
  Variant (60)..(60): Xaa in position 60 is Gly, Leu or Val
ERAXXIXRXXXXXXTXXXXXXXXFXXXPXXXPXXXXXXEXFXXXFXXXXSXXVXLXXXXX

SEQ ID NO: 87 - protein, 54 aa, Artificial sequence
  protein pattern
  Variant (2)..(2): Xaa in position 2 is Ile or Val
  Variant (3)..(3): Xaa in position 3 is Ser or Thr
  Variant (4)..(4): Xaa in position 4 is Ala or Leu
  Variant (5)..(5): Xaa in position 5 is Asp or Glu
  Variant (6)..(6): Xaa in position 6 is Arg or Ser
  Variant (7)..(8): Xaa in position 7 to 8 is any amino acid
  Variant (9)..(9): Xaa in position 9 is Gly or Thr
  Variant (10)..(10): Xaa in position 10 is Cys or Asn
  Variant (11)..(11): Xaa in position 11 is any amino acid
  Variant (12)..(12): Xaa in position 12 is Glu or Thr
  Variant (13)..(13): Xaa in position 13 is Ala, Ile or Val
  Variant (14)..(14): Xaa in position 14 is Ala or Gly
  Variant (15)..(15): Xaa in position 15 is Asp, Glu or Asn
  Variant (16)..(16): Xaa in position 16 is Leu or Val
  Variant (17)..(17): Xaa in position 17 is Leu or Met
  Variant (18)..(21): Xaa in position 18 to 21 is any amino acid
  Variant (22)..(22): Xaa in position 22 is Leu or Val
  Variant (23)..(23): Xaa in position 23 is Pro or Ser
  Variant (24)..(24): Xaa in position 24 is Asp or Glu
  Variant (25)..(25): Xaa in position 25 is any amino acid
  Variant (26)..(26): Xaa in position 26 is Ala or Pro
  Variant (27)..(27): Xaa in position 27 is any amino acid
  Variant (28)..(28): Xaa in position 28 is Ile or Leu
  Variant (30)..(30): Xaa in position 30 is any amino acid
  Variant (33)..(35): Xaa in position 33 to 35 is any amino acid
  Variant (36)..(41): Xaa in position 36 to 41 is any or no amino acid
  Variant (43)..(43): Xaa in position 43 is any amino acid
  Variant (45)..(45): Xaa in position 45 is any amino acid
  Variant (46)..(46): Xaa in position 46 is Asn, Pro or Ser
  Variant (49)..(49): Xaa in position 49 is any amino acid
  Variant (50)..(50): Xaa in position 50 is Ala or Glu
  Variant (52)..(52): Xaa in position 52 is Asp or Pro
VXXXXXXXXXXXXXXXXXXXXXXXXXXXAXYLXXXXXXXXXSXWXXYIXXLXRQ

SEQ ID NO: 88 - protein, 42 aa, Artificial sequence
  protein pattern
  Variant (2)..(2): Xaa in position 2 is any amino acid
  Variant (4)..(4): Xaa in position 4 is Arg or Ser
  Variant (6)..(6): Xaa in position 6 is any amino acid
  Variant (7)..(7): Xaa in position 7 is Phe, Leu or Val
  Variant (8)..(9): Xaa in position 8 to 9 is any amino acid
  Variant (10)..(10): Xaa in position 10 is Ala or Ser
  Variant (12)..(13): Xaa in position 12 to 13 is any amino acid
  Variant (14)..(14): Xaa in position 14 is Glu, Asn or Ser
  Variant (15)..(15): Xaa in position 15 is Asp or Gly
  Variant (16)..(17): Xaa in position 16 to 17 is any amino acid
  Variant (19)..(19): Xaa in position 19 is any amino acid
  Variant (20)..(20): Xaa in position 20 is Asp or Glu
  Variant (22)..(23): Xaa in position 22 to 23 is any amino acid
  Variant (24)..(24): Xaa in position 24 is Ala or Val
  Variant (25)..(25): Xaa in position 25 is Ala or Leu
  Variant (26)..(26): Xaa in position 26 is any amino acid
  Variant (27)..(27): Xaa in position 27 is Lys or Arg
  Variant (28)..(28): Xaa in position 28 is any amino acid
  Variant (30)..(30): Xaa in position 30 is any or no amino acid
  Variant (33)..(35): Xaa in position 33 to 35 is any amino acid
  Variant (36)..(36): Xaa in position 36 is any or no amino acid
  Variant (38)..(38): Xaa in position 38 is Pro or Gln
  Variant (39)..(39): Xaa in position 39 is Leu or Val
  Variant (41)..(41): Xaa in position 41 is Ile or Val
  Variant (42)..(42): Xaa in position 42 is Gly or Thr
PXDXVXXXXXLXXXXXXYXXKXXXXXXXGXLSXXXXFXXRXX

SEQ ID NO: 89 - protein, 49 aa, Artificial sequence
  protein pattern
  Variant (2)..(2): Xaa in position 2 is any amino acid
  Variant (3)..(3): Xaa in position 3 is any or no amino acid
  Variant (5)..(5): Xaa in position 5 is Gly, Asn or Ser
  Variant (6)..(6): Xaa in position 6 is Ala or Asp
  Variant (7)..(7): Xaa in position 7 is Ala, Asp, Thr or Val
  Variant (9)..(10): Xaa in position 9 to 10 is any or no amino acid
  Variant (12)..(13): Xaa in position 12 to 13 is any amino acid
  Variant (15)..(15): Xaa in position 15 is Leu or Met
  Variant (16)..(16): Xaa in position 16 is Asp, Ser or Thr
  Variant (17)..(17): Xaa in position 17 is any amino acid
  Variant (18)..(18): Xaa in position 18 is Asn or Ser
  Variant (22)..(22): Xaa in position 22 is Glu or Pro
  Variant (23)..(23): Xaa in position 23 is any amino acid
  Variant (24)..(24): Xaa in position 24 is Lys or Arg
  Variant (25)..(25): Xaa in position 25 is Leu, Met or Val
  Variant (26)..(26): Xaa in position 26 is Ala, Gly or Ile
  Variant (27)..(27): Xaa in position 27 is Ile or Leu
  Variant (28)..(28): Xaa in position 28 is any amino acid
  Variant (29)..(29): Xaa in position 29 is Glu, Lys or Arg
  Variant (30)..(30): Xaa in position 30 is any amino acid
  Variant (31)..(31): Xaa in position 31 is Asp or Pro
  Variant (32)..(32): Xaa in position 32 is Ala, Ile or Val
  Variant (33)..(33): Xaa in position 33 is any amino acid
  Variant (34)..(34): Xaa in position 34 is Asp or Glu
  Variant (35)..(35): Xaa in position 35 is Gln or Arg
  Variant (36)..(38): Xaa in position 36 to 38 is any amino acid
  Variant (39)..(39): Xaa in position 39 is Ala or Pro
  Variant (40)..(42): Xaa in position 40 to 42 is any amino acid
  Variant (43)..(43): Xaa in position 43 is Ile, Leu or Val
  Variant (44)..(45): Xaa in position 44 to 45 is any amino acid
  Variant (46)..(46): Xaa in position 46 is Gly or Ser
  Variant (48)..(48): Xaa in position 48 is Asp or Lys
SXXEXXXSXXLXXWXXXXGLPXXXXXXXXXXXXXXXXXXXXXXXXXEXL

SEQ ID NO: 90 - protein, 38 aa, Artificial sequence
  protein pattern
  Variant (2)..(2): Xaa in position 2 is any amino acid
  Variant (3)..(4): Xaa in position 3 to 4 is any or no amino acid
  Variant (6)..(6): Xaa in position 6 is any or no amino acid
  Variant (8)..(11): Xaa in position 8 to 11 is any amino acid
  Variant (12)..(12): Xaa in position 12 is Leu or Val
  Variant (14)..(14): Xaa in position 14 is Gly or Pro
  Variant (15)..(15): Xaa in position 15 is any amino acid
  Variant (16)..(16): Xaa in position 16 is Asp, Glu, Pro or Ser
  Variant (17)..(21): Xaa in position 17 to 21 is any amino acid
  Variant (22)..(23): Xaa in position 22 to 23 is Asp or Glu
  Variant (24)..(24): Xaa in position 24 is any amino acid
  Variant (25)..(25): Xaa in position 25 is Ala or Leu
  Variant (26)..(26): Xaa in position 26 is any amino acid
  Variant (28)..(28): Xaa in position 28 is Ala or Asp
  Variant (29)..(29): Xaa in position 29 is Pro or Ser
  Variant (30)..(30): Xaa in position 30 is Asn or Ser
  Variant (31)..(31): Xaa in position 31 is any amino acid
  Variant (32)..(32): Xaa in position 32 is Gly, Ser or Thr
  Variant (33)..(33): Xaa in position 33 is Pro, Ser or Thr
  Variant (34)..(36): Xaa in position 34 to 36 is any amino acid
  Variant (37)..(37): Xaa in position 37 is Ala, Asp, Gly or Val
  Variant (38)..(38): Xaa in position 38 is Ala, Leu or Val
LXXXAXYXXXXXSXXXXXXXXXXXXXAXXXXXXXXXXX

SEQ ID NO: 91 - protein, 34 aa, Artificial sequence
  protein pattern
  Variant (2)..(4): Xaa in position 2 to 4 is any amino acid
  Variant (5)..(6): Xaa in position 5 to 6 is any or no amino acid
  Variant (8)..(11): Xaa in position 8 to 11 is any amino acid
  Variant (12)..(12): Xaa in position 12 is any or no amino acid
  Variant (14)..(15): Xaa in position 14 to 15 is any amino acid
  Variant (16)..(16): Xaa in position 16 is Gly or Ser
  Variant (17)..(18): Xaa in position 17 to 18 is any amino acid
  Variant (19)..(19): Xaa in position 19 is Arg or Ser
  Variant (20)..(20): Xaa in position 20 is any amino acid
  Variant (21)..(21): Xaa in position 21 is Leu or Pro
  Variant (22)..(22): Xaa in position 22 is any amino acid
  Variant (23)..(23): Xaa in position 23 is Glu or Arg
  Variant (24)..(24): Xaa in position 24 is any amino acid
  Variant (26)..(26): Xaa in position 26 is any amino acid
  Variant (27)..(27): Xaa in position 27 is Ile or Val
  Variant (28)..(28): Xaa in position 28 is Ile or Leu
  Variant (29)..(30): Xaa in position 29 to 30 is Arg or Ser
  Variant (31)..(31): Xaa in position 31 is Gln or Arg
  Variant (32)..(32): Xaa in position 32 is Gly or Leu
  Variant (33)..(33): Xaa in position 33 is any amino acid
  Variant (34)..(34): Xaa in position 34 is Asp or Val
RXXXXXQXXXXXLXXXXXXXXXXXQXXXXXXXXX

SEQ ID NO: 92 - protein, 14 aa, Artificial sequence
  protein pattern
  Variant (2)..(2): Xaa in position 2 is any or no amino acid
  Variant (5)..(5): Xaa in position 5 is any or no amino acid
  Variant (7)..(7): Xaa in position 7 is Ser or Thr
  Variant (8)..(8): Xaa in position 8 is Glu, Gln or Arg
  Variant (9)..(9): Xaa in position 9 is Ala, Pro or Thr
  Variant (13)..(13): Xaa in position 13 is any or no amino acid
SXLLXWXXXELDXY

SEQ ID NO: 93 - protein, 15 aa, Artificial sequence
  protein pattern
  Variant (2)..(2): Xaa in position 2 is Asp, Glu or His
  Variant (3)..(7): Xaa in position 3 to 7 is any amino acid
  Variant (8)..(8): Xaa in position 8 is Asp or Val
  Variant (9)..(9): Xaa in position 9 is any amino acid
  Variant (10)..(10): Xaa in position 10 is Ser or Thr
  Variant (12)..(12): Xaa in position 12 is any amino acid
  Variant (13)..(13): Xaa in position 13 is Gly or Thr
  Variant (14)..(14): Xaa in position 14 is Ile, Leu or Val
VXXXXXXXXXSXXXV

SEQ ID NO: 94 - DNA, 1191 bp, Arabidopsis thaliana
  CDS (1)..(1191)
atggctccggtgaagcagaagaagaagaataagaagaagcctctggataaggcgaagaagttggcgaagaataaagagaagaagagagtcaacgcagtgccattggatccggaggctatcgactgcgactggtgggatactttctggctccgaaactcttctccctcagtcccctcagacgaagactatgcgttcaagcacttctttagggcttctaagacaacttttagctacatttgctcgctcgtcagggaggaccttatctctagacctccctctggtctcatcaacatcgagggaaggcttcttagtgttgagaaacaagtcgccattgctcttcgaaggttagcttccggtgattctcaggtctccgttggtgctgcctttggtgttggccagtccactgtttctcaggttacatggagattcatcgaggcactcgaagaacgtgccaagcatcatcttagatggccagattctgaccgaattgaagagatcaagtcaaagttcgaggagatgtacggtctccccaattgctgcggagccattgacactacgcacatcatcatgactctcccggctgtgcaagcatcagatgactggtgtgaccaggagaagaactacagcatgttcttacaaggagtctttgatcacgagatgagatttctcaacatggttaccggctggcctggcggcatgaccgtctccaagcttctcaagttctctggcttcttcaaactctgtgaaaacgctcagattttagacggcaatcctaaaactctatcccaaggagcccagattagagaatacgttgttggagggatcagttacccgcttcttccctggcttataactcctcacgacagcgatcatccctctgattccatggtggcgttcaacgaaaggcatgagaaggtgaggtcagtcgcagctactgcctttcaacagcttaaaggaagctggaggattctgagcaaagttatgtggagaccagacaggaggaagctacctagtataatactggtgtgttgtttgttgcataacatcattatcgactgtggggattatcttcaagaagatgttcctttgtctggtcatcacgactccggttatgcagaccggtactgcaagcagaccgagccgcttggtagtgagctcagaggatgtctgactgagcatttgcttaggtga

SEQ ID NO: 95 - protein, 396 aa, Arabidopsis thaliana
MAPVKQKKKNKKKPLDKAKKLAKNKEKKRVNAVPLDPEAIDCDWWDTFWLRNSSPSVPSDEDYAFKHFFRASKTTFSYICSLVREDLISRPPSGLINIEGRLLSVEKQVAIALRRLASGDSQVSVGAAFGVGQSTVSQVTWRFIEALEERAKHHLRWPDSDRIEEIKSKFEEMYGLPNCCGAIDTTHIIMTLPAVQASDDWCDQEKNYSMFLQGVFDHEMRFLNMVTGWPGGMTVSKLLKFSGFFKLCENAQILDGNPKTLSQGAQIREYVVGGISYPLLPWLITPHDSDHPSDSMVAFNERHEKVRSVAATAFQQLKGSWRILSKVMWRPDRRKLPSIILVCCLLHNIIIDCGDYLQEDVPLSGHHDSGYADRYCKQTEPLGSELRGCLTEHLLR

SEQ ID NO: 96 - DNA, 1454 bp, zea mays
  CDS (115)..(1329)
tacccattgggtacctcgggaaaggccggactttattttgcgaggagggggcacaacatctcaggcctccagtcttcgagtcctcgttgtgcctctcttgatctcctcgcgtccatggctcctgtgcgaggtgccaagaagaggaagcggccggagaagcccgccccggcgcctactccagggttgccgctgccgccgctgccggacggtagcgattggtggggcgtcttctaccgaagggttgcaggacattccccttttccaagagaacaccagaacatggagtctgtcctgaagatgtcaagaagaaccttcgactacatctgctcacttgttaagaaggacctgacaacaaagacatacggtttcagaaacttcaggtttggtgacaagaaagtccttggggtggaggatcaggtggcggtggctctgatgaggctgactactggtgagtcgctgcagaacataggaatgtggtttggcatgaaccactctgccatctcgaacatcacatggcggttcatcgagtccgtggaggagcgtgccatctgccacctgaaatggccgagccctgaggagatggcgaccatcaagacaaggtttgacaaggtttacgggctccctaactgctgcggcgccattgacaccacacacatcctcatgtgttcctcggctcagcccaacagcaaggtctggctggacaatgagaacaaaaacagcatggtgctgcaggccgttgtggatgcagacttgcggttcagagacgtcgtcagtggctggcctgggagcatggacgacacgtgcatccttcgcacttcaggcctgtacaggttgtgtgagaagggcctcaggcttggggggcagatggagcttcccggaggttccgcggttagggagtacctagtcggagatgcaagctacccgctacttccctggctcatgaccccgtaccgggaacatggcctccaggcggccaaggtggaattcaacaagcggcacacggccgcggcggcggtggtgcagaccgcattggcgacgctcaaagggaggtggcgtgtcatccagggagagctgtggaggcctgacaaacaccggctgccacggatcatctttgtctgctgcttgataaccaacatcatcatcgacatggaagggactccaagcagagacgaactggtttcaggcaaccatgaccttggctacaagcagcagttcagtgacgccgcagatgacaatgcaatcaagcagagagacgacctgtctcggcatgtcgacaatgcaatcaagcggagagacgatctgtctcaccatgtcaccgccggcgagtaaacactcaccgtcaccctttgctttttgcacccattaatataaaaacatggatacaaaattgtaaggtgaatttttggcagattccaataatgttttggtttcagggagacatattaccatctttt

SEQ ID NO: 97 - protein, 404 aa, zea mays
MAPVRGAKKRKRPEKPAPAPTPGLPLPPLPDGSDWWGVFYRRVAGHSPFPREHQNMESVLKMSRRTFDYICSLVKKDLTTKTYGFRNFRFGDKKVLGVEDQVAVALMRLTTGESLQNIGMWFGMNHSAISNITWRFIESVEERAICHLKWPSPEEMATIKTRFDKVYGLPNCCGAIDTTHILMCSSAQPNSKVWLDNENKNSMVLQAVVDADLRFRDVVSGWPGSMDDTCILRTSGLYRLCEKGLRLGGQMELPGGSAVREYLVGDASYPLLPWLMTPYREHGLQAAKVEFNKRHTAAAAVVQTALATLKGRWRVIQGELWRPDKHRLPRIIFVCCLITNIIIDMEGTPSRDELVSGNHDLGYKQQFSDAADDNAIKQRDDLSRHVDNAIKRRDDLSHHVTAGE

SEQ ID NO: 98 - DNA, 1420 bp, zea mays
  CDS (67)..(1284)
gaaggggagacgaacgcagactgcagcaggagcggagcgggcggagaggttcagggcgttcgggagatgcctcccgtgaagaagtccaagaaggggaagcggaaatccaaggatggcaagctcaagattgtcagggcgcggggcgcgccgccggcgctgccgccggagctccgcgccctcgacaccgagtggtggtacgctttcctgaacaagcaagtcgagctagagcatgctgtgcctccagatgagggggaagcattcaggcacttcttcaggacttcaaggaagacttttgactacatctgctccattgttagggaagatctgatctcaaggccaccgtctggactgatcaacattgaggggaggctgctcagtgtggagaagcaagtggcaattgccatgaggaggcttgcgtccggtgattcccaggtgtcagtagggactgcttttggtgtgggccagtctactgtttcacaagtgacatggaggtttatcgagtcgatggaagatagggctaggtatcatctggcatggccaagccaagagagacttgagcagatcaaagctgtgctggaggatgcttatggactgccgaattgttgtggtggtgttgatgccacccacgtaatcatgacgcttcctgctgtcgagtcatctgcagattggtgtgatcatgcaaagaactacagtatgttcctgcaagggattgttgatgatcagatgaggtttattgatattgttactggttggcctggcagcatgacattctcacgcctgatgaaatgctctgggtttttcaagctctgtgaagctggggaacgtttgaatggctctgtcaaagtttcagcagagggtgcagagatcagggaatacattgctggtgactcatgttatcctctactcccatggcttatgactccattcgaaggaaaacatctccctgccccattgcaaaactttaatgcccgccaaaaagctgcaaggctgcttggaacaaatgcgttggcgcggctgaagggatcctggaggatcttacacaaagtcatgtggaggcctgacaagaacaagttgccaagtataattcttgtttgctgtctgcttcacaatatactcatagactgccatgatgaattgcttccaagtgttcaacttcccgaacatcatgatactggatataatcgagaaaactgcgagcaggtggatcctaatggcaaagtgatgagagaaaacattacagcacatctccaacactgtgaagcttccaagtttctctgcaactgagctaagttggcttgttgttttgctgggatttggatgatgcatcattattccttttaccttatgcaatttcccttagtttctgttattgtagtgagactttctgattgcaattcagtaaagattctctagaaatggc

SEQ ID NO: 99 - protein, 405 aa, zea mays
MPPVKKSKKGKRKSKDGKLKIVRARGAPPALPPELRALDTEWWYAFLNKQVELEHAVPPDEGEAFRHFFRTSRKTFDYICSIVREDLISRPPSGLINIEGRLLSVEKQVAIAMRRLASGDSQVSVGTAFGVGQSTVSQVTWRFIESMEDRARYHLAWPSQERLEQIKAVLEDAYGLPNCCGGVDATHVIMTLPAVESSADWCDHAKNYSMFLQGIVDDQMRFIDIVTGWPGSMTFSRLMKCSGFFKLCEAGERLNGSVKVSAEGAEIREYIAGDSCYPLLPWLMTPFEGKHLPAPLQNFNARQKAARLLGTNALARLKGSWRILHKVMWRPDKNKLPSIILVCCLLHNILIDCHDELLPSVQLPEHHDTGYNRENCEQVDPNGKVMRENITAHLQHCEASKFLCN

SEQ ID NO: 100 - DNA, 1754 bp, zea mays
  CDS (344)..(1516)
ccggccggggtagtaggaagaaaacccccgacacacacccgaagaaagaggctcgctcctcccttcgctctctccaccttgcggcgctccacctccgtcccctcgccgccgcttctcacttcgcctcccctctcaaacaccccaagccgcagcgcaggcacgcgcgccgacgtctatccacccagcggcactcctcatgccctgcatcctccaccgcctgcagacgagtcccccacgccaccgcggccacgcctcgccgtccatgtccatggccgccgccccggcttcctgattcgtcccgtacccgcgcgtcgctcctcccgattccatccccgtccgcgccatgccgccgctgcgcggagccaagcgccgccggaaggcggcgttggagaagaaggcggcagcggtcgcaatggcgtctgccgccgcgggcgaccctcctggcgactggtgggaagccttctgcatccgtatgtcaggaaccttatcttctatcgaggatgcacaaagatttgagtctatattcaaaatgccaagaagagccttcgactatgtctgcaatttggtgagagatgaaatgatggtgaggtcctgcagctataccttccttgatggcacagtgctgtgtttggaagaccgagtggccattgctctgcgaaggctgaactctggtgggtcactggtgaccgtaggatcctctgttggagtgaaccactcaaccgtgtcgctgataacctggaggttcatcgaggctatggaggagcgagcgagccaccacctgcgctggccagactctattgaaatggagaagatcaagtccaagttcgagaagatccatggtctgccaaactgctgcggcgttgtggatacaacacacatcacaatgtgcctttcatcagccgagccgaactgcaaggtctggcttgatcaggagaagaactacagcatggtgttgcaagccgttgttgatctggacaccaagttcacagacatcgtgactggctggcctggtagcatgaaagagtcgagcattttgcacagctctggccttttcaagctctgcgagaaaggcgagcggctgaatggcagcaagctgaaggtatcagatgggtcagagatcggggaatacttgatcggcgactccggctacccccttctcccctggctgctcacaccttaccaagagaaggacctcacagagtccagtgctgagttcaacattaggcactcttctgcgagaacagtcgctccgagaacactggccaagttcaaggacacatggaagttcctgcaaggggagatgtggcgtccggacaagcacaagctgccccggataatccatgtctgctgcttgctgcacaacataatcatagaccttcaggaaacagcagtggacgaggcacaggcgtggccgagcgatcatgacgctaagtacaggcagcaagtgtgccagctagctgatgagaatggagtcagggtgagggacaaactgtcccagcacctgattagcaagtgaccaccaccaagcgtaaagcttattggacgagagagtagtgccattttcatctgtttcaggcagctctaaatcccttttgatgtccagttttgcagagttgtaaatgaggcaggtgagggcatctgttcaaactcactgtaaccctcttaaaattaaaattaaggctgttgcaaacttgtcaaaaatcaataaaaaaaagtggctcgcctggtttaaaaaaaaaaaaaaaaaaaaaaaa

SEQ ID NO: 101 - protein, 390 aa, zea mays
MPPLRGAKRRRKAALEKKAAAVAMASAAAGDPPGDWWEAFCIRMSGTLSSIEDAQRFESIFKMPRRAFDYVCNLVRDEMMVRSCSYTFLDGTVLCLEDRVAIALRRLNSGGSLVTVGSSVGVNHSTVSLITWRFIEAMEERASHHLRWPDSIEMEKIKSKFEKIHGLPNCCGVVDTTHITMCLSSAEPNCKVWLDQEKNYSMVLQAVVDLDTKFTDIVTGWPGSMKESSILHSSGLFKLCEKGERLNGSKLKVSDGSEIGEYLIGDSGYPLLPWLLTPYQEKDLTESSAEFNIRHSSARTVAPRTLAKFKDTWKFLQGEMWRPDKHKLPRIIHVCCLLHNIIIDLQETAVDEAQAWPSDHDAKYRQQVCQLADENGVRVRDKLSQHLISK

SEQ ID NO: 102 - DNA, 1221 bp, Arabidopsis thaliana
  CDS (1)..(1221)
atgggaccaatcaaaacgataaagaagaagaagagagcagagaagaaggttgatcggaacgtattgcttgctgctactgctgctgctacttccgcatccgccgccgctgctcttaataacaacgacgacgacgacgactcatcatctcagtctttggattggtgggatggattctctcgccgtatttatggagggtcaacggatccaaagacatttgagtcagttttcaaaatatcaaggaagacatttgactacatttgctctcttgtgaaagccgatttcacagcaaagcctgcaaatttcagcgactcaaatgggaaccctttatctctcaatgaccgtgtagctgtggcgcttaggaggcttggctctggtgaatctctctctgtcattggagagacctttgggatgaaccagtcaacagtctcccaaatcacttggcgctttgttgaatcaatggaagagagagcaatacaccatctctcatggccttcgaaactcgatgaaataaaatcaaagtttgagaaaatctcaggtcttcctaactgctgtggcgctatcgacattacacatattgttatgaaccttcctgctgtggaaccgtcaaacaaagtttggttggacggagaaaagaacttcagcatgactttgcaggccgtagtagacccggacatgagattcctcgatgtaatagctggttggcctgggagtttaaatgatgatgttgtcctcaagaactcaggattctacaaactagttgagaaagggaagagactgaacggggaaaagttaccgctctcagaaagaaccgagctaagagaatacatagtaggtgattcaggttttcctcttcttccatggcttctcactccataccaaggcaaacccacgtcgcttcctcaaaccgagttcaacaaaagacactccgaggcaacaaaagccgcgcagatggcactatcgaagcttaaagacaggtggaggataataaacggggtaatgtggatgcctgatagaaaccggttaccaaggataatctttgtctgttgcttgctgcacaacattattatcgatatggaggatcaaactttggatgaccaacctttgtctcagcaacatgacatgaactacagacaacgaagctgcaagcttgccgatgaggcttcatcggtcttgagagatgaactctctgaccaactgtgtggaaaaaattcatcagcttga

SEQ ID NO: 103 - protein, 406 aa, Arabidopsis thaliana
MGPIKTIKKKKRAEKKVDRNVLLAATAAATSASAAAALNNNDDDDDSSSQSLDWWDGFSRRIYGGSTDPKTFESVFKISRKTFDYICSLVKADFTAKPANFSDSNGNPLSLNDRVAVALRRLGSGESLSVIGETFGMNQSTVSQITWRFVESMEERAIHHLSWPSKLDEIKSKFEKISGLPNCCGAIDITHIVMNLPAVEPSNKVWLDGEKNFSMTLQAVVDPDMRFLDVIAGWPGSLNDDVVLKNSGFYKLVEKGKRLNGEKLPLSERTELREYIVGDSGFPLLPWLLTPYQGKPTSLPQTEFNKRHSEATKAAQMALSKLKDRWRIINGVMWMPDRNRLPRIIFVCCLLHNIIIDMEDQTLDDQPLSQQHDMNYRQRSCKLADEASSVLRDELSDQLCGKNSSA

SEQ ID NO: 104 - DNA, 1191 bp, Oryza sativa (japonica cultivar-group)
  CDS (1)..(1191)
atggcaccactgaggggagccaagcggcggaagcggcagccggagaaggcgttgccggcggcggggcaggcgatgccggcgccggcgcccggcggggattggtgggacggcttcgcccgcaggcttgcagcaggacaattttccaaagactgccaaaactttgagtccgtcttcaagatgtcgaggaagacctttgactacctttgctctctgattagtggggacttcacaagaaagacacaaagtttcagaaatttcaggtttggagacaaggcaattctaggcgtggaagatcaagtaggtgttgctctgttaagattgaccaccggtgagtcgcttttgagcatagggaaccgcttcgggatgaaccactcagctatctcaaacatcacttggaagtttattgaggccttggaggagcgcgctgccaatcatcttaagtggcctactcctgaggagatggcaaccgtcaaatctaagtttgaaaagattcagggcctccccaactgctgcggcgccatagacacaacgcacatcctcatgtgctcttcagctcagcctaacagcaatgtctggctcgacggcgagaacaggaacagcatggtcctgcaggccatcgtcgatgccgacatgcggttcagagacgttgtcagtggctggcctggcagcttgaatgactcgtgcatcctgcgcacctcaggattctacaggctctgcgagaaaggcgcgaggctggacggacaaacggagcttccaggagagccagctgggtcagtggtcagagactacattcttggggatgcaagctaccctctccttccctggctgatgactccataccgtgagaaggatctatctccggcgaaagccgacttcaacaagcggcacgccgcgacgatcatggtggtgcagggtgctctggccaagctgaaggagaggtggcaggttctcaagggagagctgtggaggccggacaagcaccggctgccgaggatcatctacgtctgctgcctgctcaccaacatcatgatcgacctcgaggacgcggcgaggggcggcatgccgccgtcgcacaaccacgacgacggctaccggcagcagttcagcgatgtcgccgacgtcggcgcggccgcgctgagggaccagctgtgccagtatgtgagcaggattggcagcagtttgccggcgtga

SEQ ID NO: 105 - protein, 396 aa, Oryza sativa (japonica cultivar-group)
MAPLRGAKRRKRQPEKALPAAGQAMPAPAPGGDWWDGFARRLAAGQFSKDCQNFESVFKMSRKTFDYLCSLISGDFTRKTQSFRNFRFGDKAILGVEDQVGVALLRLTTGESLLSIGNRFGMNHSAISNITWKFIEALEERAANHLKWPTPEEMATVKSKFEKIQGLPNCCGAIDTTHILMCSSAQPNSNVWLDGENRNSMVLQAIVDADMRFRDVVSGWPGSLNDSCILRTSGFYRLCEKGARLDGQTELPGEPAGSVVRDYILGDASYPLLPWLMTPYREKDLSPAKADFNKRHAATIMVVQGALAKLKERWQVLKGELWRPDKHRLPRIIYVCCLLTNIMIDLEDAARGGMPPSHNHDDGYRQQFSDVADVGAAALRDQLCQYVSRIGSSLPA

SEQ ID NO: 106 - DNA, 1326 bp, Oryza sativa (japonica cultivar-group)
  CDS (1)..(1326)
atggagaagaaaaccaaaaagaagaaccctagcaagagggggagaaaaagaggaggaagaggggagggaagggagaagaaagtggaggagatcagcagcagcagcagcagccgcggccgcggccgccggaggatggcgccggtgaagaagtccaagaaagggaagcgcaagtccaaggactccggcaagctcaagatcgtcaagtatggcggcggcgcccctcccctcccccccgagctccgcggcctcgacaccgagtggtggtacaccttcctccacaagcactccgagctaggtctgagcgcgccgtcagatgagggggaggcgttcaggtatttcttcaggacgtcgaggaggacgttcgactacatctgctcgattgtgagggaggatttgatctctaggccgccgtcagggctgatcaacatcgaggggaggctgctcagtgtggagaagcaggtggcgattgccatgaggaggctggcgtcgggcgattcgcaggtgtcggtgggggcggcttttggtgtcgggcagtccaccgtctcgcaggtgacttggaggttcatcgagtcgatggaagagcgggctcggcatcatctggtgtggcccgggcaggagaggatggagcagatcaaggcgaggttcgaggccgagtccggtctgccgaattgttgcggcgccatcgatgcgacccacattatcatgacgcttcctgctgtcgagtcgtctgaggattggtgcgacccggcgaagaattacagcatgttcctgcaggggattgttgatgatgagatgaggtttattgatattgtcactggttggcctggcagcatgatgttttcgcggttgctgaagtgctctgggtttttcaagcactgcgatgctgggactcgcttggatggccctgtcatggtttcagcagagaatggagaaatcagggagtacattgttggtaacaattgttatcctttactcccatggcttatgactccctatgaaggggagagtctgtctgctccaatggccagctttaatgctaggcagaaggctgcaagaacgcttggaccaagagcactgtcacggctgaagggctcctggaggatcttaaacaaagtcatgtggaggcctgataagaacaagttgccgagcataattcttgtctgctgtttgcttcacaatataatcatagactgtgaagacgaactgcttccagatgtacaacttccagatcaccatgatactggttatagtgaagagaagtgcgagcaagtggatcctaatggcaagataatgagagatgtcattacaggatatcttcaaatctaa

SEQ ID NO: 107 - protein, 441 aa, Oryza sativa (japonica cultivar-group)
MEKKTKKKNPSKRGRKRGGRGEGREKKVEEISSSSSSRGRGRRRMAPVKKSKKGKRKSKDSGKLKIVKYGGGAPPLPPELRGLDTEWWYTFLHKHSELGLSAPSDEGEAFRYFFRTSRRTFDYICSIVREDLISRPPSGLINIEGRLLSVEKQVAIAMRRLASGDSQVSVGAAFGVGQSTVSQVTWRFIESMEERARHHLVWPGQERMEQIKARFEAESGLPNCCGAIDATHIIMTLPAVESSEDWCDPAKNYSMFLQGIVDDEMRFIDIVTGWPGSMMFSRLLKCSGFFKHCDAGTRLDGPVMVSAENGEIREYIVGNNCYPLLPWLMTPYEGESLSAPMASFNARQKAARTLGPRALSRLKGSWRILNKVMWRPDKNKLPSIILVCCLLHNIIIDCEDELLPDVQLPDHHDTGYSEEKCEQVDPNGKIMRDVITGYLQI

SEQ ID NO: 108 - DNA, 1176 bp, Oryza sativa
  CDS (1)..(1176)
atggcgccgttgcgcggggccaagcgccggaggaaggcggcggcggagaagaaggctgcaatggcggcggccgctgcggcgggtggcgcgcccggagcaggcggcggcgactggtgggacggcttctgcatgcggatgtcaggaaccttgtctggtatacaggatgcacaaagatttgagtttatcttcaaaatgccaaggagaaccttcaactacatctgtggtttggtgagagatgaaatgatggtgaggtctagcagctatacctttcttgatgggaaggtgctgtctttagaagatcgggtggcggtggctctgataaggttgaattctggcggatcactagtgactgtaggatctgctgttggtgtaaaccactcaaccgtgtcactgattacttggaggtttgttgaggctatggaggagcgagcaagccaccatttgcggtggccagattccagtgaagtggagaagatcaaatccatgtttgagaagatacatggtttgccaaactgctgcggtgttgtagacacaacacatatcacaatgtgcctttcttcagctgagccaaactgtaaggtctggctagaccatgagaaaaattacagcatggtcttgcaagctgttatcagtccagatatgaggttcatggacattgtgacagggtggcctggtagcatgaaagagtcgagcattttgcatagctctggtcttttcaagatgtgcgagaaaggagcacggcttaacggcagcaagatggtagtgtctgatgggtcagaaattggtgaatacataattggtgatgcaggatacccccttcttccctggcttctcacaccgtaccaagaaaaggacctctcagattctaagctggagttcaataagagacacgcagcggccataacagttgctccaagtacattggcgaacttcaaggacacatggaaattcctgcatggcgagatgtggcgccccgacaagcacaggctgcctcggataatccatgtgtgctgcatgctgcacaacataatcatatgccttcaggatgcaaccatcgacgaggcagccatgtcgaacgatcacgacgcgaattacaagcagcaggtgtgccagttagcagatgagaatgctgtgagggtgagggacaaactgtctgagcacttggtcagcaggtga

SEQ ID NO: 109 - protein, 391 aa, Oryza sativa
MAPLRGAKRRRKAAAEKKAAMAAAAAAGGAPGAGGGDWWDGFCMRMSGTLSGIQDAQRFEFIFKMPRRTFNYICGLVRDEMMVRSSSYTFLDGKVLSLEDRVAVALIRLNSGGSLVTVGSAVGVNHSTVSLITWRFVEAMEERASHHLRWPDSSEVEKIKSMFEKIHGLPNCCGVVDTTHITMCLSSAEPNCKVWLDHEKNYSMVLQAVISPDMRFMDIVTGWPGSMKESSILHSSGLFKMCEKGARLNGSKMVVSDGSEIGEYIIGDAGYPLLPWLLTPYQEKDLSDSKLEFNKRHAAAITVAPSTLANFKDTWKFLHGEMWRPDKHRLPRIIHVCCMLHNIIICLQDATIDEAAMSNDHDANYKQQVCQLADENAVRVRDKLSEHLVSR

SEQ ID NO: 110 - DNA, 1430 bp, Brassica napus
  CDS (96)..(1316)
cacaaatcttctttactgaacattttttattttattttgactcttcccacgacttccccatctactagtgaaagagtatcgtatcggagatctaaatgggacctatcaaagcgttaaagaagaggaagagatcagccgagaagaaggctgatcccaacgtcttgctcgctgctgcttccgccgccactgattctcttcacaacgacaacaacgacaacgacgacgactcatctcagccgtcggattggtgggatggattctctcgccgtatttctggtccatactcggggtctacggatcccaagacattcgagtcagtcttcaaagtatcaagaaaaacatttgactacatttgctctctcgtgaaagacgacttcacagcaaagcctgcaaacttcagcgactctaacggcaaacctttaactctcaacgaccgtgttgctgttgctctcaggaggctcggctctggcgagtctctctccgtcattggagagtcctttgggatgaaccagtccaccgtttcgcagatcacttggcgcttcgttgagtccatggaagagagagctctccaccacctctcatggccttcgaagctcgacgatgtaaaatcaaagttcgagaagatctcaggccttccaaactgctgtggagcaatcgacatcacgcatgtcatgatgaaccttcccaatgtggaactgtcgaacaaggtttggttggacggggagaagaacttcagcatggtgttgcaggctgttgtggaccctgagatgaggttcctcgacgtgattgctggttggcctgggagtttaagcgacgacgtcgtcctcaagaactcgggattcttcaaactcgttgagaaagggaagagactgcacggggggaagatccagctctcggagagaacagagctaagagaatacatagtaggtgactcaggctttcctcttcttccgtggcttctcactccataccagggcaaacccatgtcgcttcctcaaacagagttcaacaaaagacactccgagactagaaagcccgcgcagatggcgttgtccaggcttaaagataagtggaggatcataaatggagtgatgtggatgcctgatagaaaccggttaccgaggattatatttgtgtgttgcttgctgcacaacattcttattgatatggatgatcagactctggatgatcgtcttttgtcgccccaacatgacgtgaattacaggcagagaagctgcaagactgtcgatgaggcttcatctgtcttgagagatgaactctctaaccaattgtggggagaaaattcgtcagcttgattgatctccatgttcttgtcttctttgtgtaaaagattcatctgcttctgttttgcatacaacattttattcgtatcctttcataaaaatgtgtattttcaaaaaaaaaaaaaa

SEQ ID NO: 111 - protein, 406 aa, Brassica napus
MGPIKALKKRKRSAEKKADPNVLLAAASAATDSLHNDNNDNDDDSSQPSDWWDGFSRRISGPYSGSTDPKTFESVFKVSRKTFDYICSLVKDDFTAKPANFSDSNGKPLTLNDRVAVALRRLGSGESLSVIGESFGMNQSTVSQITWRFVESMEERALHHLSWPSKLDDVKSKFEKISGLPNCCGAIDITHVMMNLPNVELSNKVWLDGEKNFSMVLQAVVDPEMRFLDVIAGWPGSLSDDVVLKNSGFFKLVEKGKRLHGGKIQLSERTELREYIVGDSGFPLLPWLLTPYQGKPMSLPQTEFNKRHSETRKPAQMALSRLKDKWRIINGVMWMPDRNRLPRIIFVCCLLHNILIDMDDQTLDDRLLSPQHDVNYRQRSCKTVDEASSVLRDELSNQLWGENSSA

SEQ ID NO: 112 - DNA, 2148 bp, Triticum aestivum
  CDS (192)..(1475)
gaattcccgggtcgacctgcatattggcggtggcgatggttattgccatcacgaggattgtttggatgagtaaggtcttcatggtggatttgcgttaactactacctacttggatttgatgcttgtgctctagttccggacaagaggaagggttggaaggcggcggcaggatagaggagaggagtcagaagatggctccggtgaagaagcccaaaaaggccaagcggaagatcagtgactccggcgagaccaagatcgatgactccatcgaagcgaagaccaaggacgccagcaaggtcaagagaaccaagtccggcggctcgttggcgttgcttccggcggaccttcgtggccccgatacggaatggtggtatgtcttcctcagcaagcacgcggaactccacaaggaagccgaatcaggtggtcgtgctccagtgccttcagatgacgaggaagcgttcaggtacttcttcaggacatcgaggaggacttttgactacatctgctcgattgtacgggaggatttgatatcgaggccgccttctgggctgatcaacattgaggggagactgcttagtgtggagaagcaagtagcaattgccatgaggaggctggcatctggggattcgcaggtgtccgttggagctgcttttggtgtgggacagtctactgtttcccaagtcacatggaggtttatcgagtcaatggaagagagggctcggcatcatttggtgtggccgggccaggagaggatggaggagatcaaagctaggttggaggctgtctctggtctaccgaattgctgcggtgccattgatgccacacacattatcatgacgcttcctgctgttgagtcatccgaagactggtgtgaccctgcgaaaaactacagtatgttcctacaaggtattgttgacgatgagatgagatttattgatattgtcaccggttggccagggagcatgacattctcacgcttgttaaaatgctctgggttttacaagctctgtgaggctggaaaacgcttgaatggtcctgtcagaacttcaggggaggattcagaaataagggagttcattgttggtgacatgtgttatcctctactgccatggcttatgactccataccaaggagaaagtctatctaccccaatggtcaactttaatgcccggcaaaaaactgcaaggatgcttggaacaagagcattggcacggctgaaaggctcctggaagatcttgcacaaagtcatgtggaggcctgataaaaataagttaccgagtatcatcctggtgtgctgcctgcttcacaatataattctggactgcaacgacaaactgcttctggatattcagcttccagatcatcatgataatggttataacgaagagaactgccagcaagagaatcctaatggcaaagtaattagagagatcattacaggatatctcccaacttatgaagcaacatcaaactgaattaagctggatggaagcatagttggagatgtgatgatgtgcctttgttctattgttatttacctcagttatccctaatgttcatgttctagtttaatcagatctgctgagttaattttgagttaatttttcctgatgatgacagtccctatcatgttgagtttcataatgttgctgaggccaaaaaaaaaaaaaaaaaaaaaaaaaaaaaaaaaaaaaaaaaaaaaaaaaaaaaaaaaaaaaaaaaaaaaaaaaaaaaaaaaaaaaaaaaaaaaggggggggggcgtgctcggaggacgccgccagcggggagtgcgccgcggcgtgggacgaggtggaggagctcagcgccgcggccagccacgcccgggacaagctcaaggactcggacccgctcgagaactactgcaaggagaaccccgagaccgacgagtgccgcacctacgacagctgagcgtacgtgctaatttgttctggacggcggatagtgaagctggacgtggtgttcttggctcatgggagcccgagaaacctgctatgtctcaacctaccgttacttacacgatcgggatgtatgtagtaaaaacgcgccaaatattttcccagggacatacatggttgatatacaattgatattacagagagagagagagaccgacacgcagcggccgc

SEQ ID NO: 113 - protein, 427 aa, Triticum aestivum
MAPVKKPKKAKRKISDSGETKIDDSIEAKTKDASKVKRTKSGGSLALLPADLRGPDTEWWYVFLSKHAELHKEAESGGRAPVPSDDEEAFRYFFRTSRRTFDYICSIVREDLISRPPSGLINIEGRLLSVEKQVAIAMRRLASGDSQVSVGAAFGVGQSTVSQVTWRFIESMEERARHHLVWPGQERMEEIKARLEAVSGLPNCCGAIDATHIIMTLPAVESSEDWCDPAKNYSMFLQGIVDDEMRFIDIVTGWPGSMTFSRLLKCSGFYKLCEAGKRLNGPVRTSGEDSEIREFIVGDMCYPLLPWLMTPYQGESLSTPMVNFNARQKTARMLGTRALARLKGSWKILHKVMWRPDKNKLPSIILVCCLLHNIILDCNDKLLLDIQLPDHHDNGYNEENCQQENPNGKVIREIITGYLPTYEATSN

SEQ ID NO: 114 - DNA, 1399 bp, Helianthus annuus
  CDS (78)..(1304)
agcggtgttcgtacccccaaattctcactacaatctgtacaaatctggatcagtaacacaacaaactccatccccaaatggccccaaagaaatcgaagcacgaactcacacccaaaaagatgaaactgaaaaaagattccaagatgaaactgaaaaagaagaagaagaagatatcatcgagttcaaacccagcagcggcagtgagtggcagcgacaacagaggcgtcgattcagagtggtggatttcgttttgggataaaaacccaccgcttcctggttcaatggtgcccgaagacgaagaagaagggttcaaatactttttccgcgtgtcaaagaaaacgttcgagtacatatgctctctagtacgagaagatctgatatcccgtccaccttccggtctcatcaacatcgaaggaagacttctcagcgtcgaaaaacaagtcgcaatcgctttaagaagattagcatccggcgaatcacaagtttccgtaggcgcgtctttcggcgtcggtcagtcaaccgtttcgcaagttacctggcggttcatcgaagctatggaagaacgcggcagacaccacctcaaatggcccgatcacgataaattacaaagcatcaaatcggaattcgaaaaaacgtttaacttaccgaattgttgcggagcgattgacgctacgcacatcgttatgaccctacccgccgttcaaacatcagacgattggtgcgatcaagttaagaactacagtatgttggtacaaggtatcgtcgatgacaaatcgagatttctcgatatcgtaacgggctggcccggtggtatgacgatcccgaaactcctaaaattttcgggattttacaaactttgcgaatcgggtcagcggttaaacggaaatccaatatcattatctaacgaatcagagattcgagaatttatcgtaggcggggcgaattatccgcttcttccgtggttaataacgccttacagtgaaactgatgaggtgtcgggtttgaatacggttcatgaagctgcgagatcgcttgccgtgagggcgttttcgcaattaaaaggaagttggaggattcttaacaaggttatgtggcgacccgataagaagaagcttccgagtatcatcgtggtgtgttgtttgcttcataatataatcatagattgcggtgattatgtaaaaccggatgtttcgttgtcgggccatcatgatttagggtatgttgaacaatggtgtaagcaggttgatcctgttgggagaaagatgagagataaccttgctgcacatttggaaaatatcaagtgaaaatggttgtaactcattcttgcaaaaatgacagtggtttatttggaagtttatttggagtaaaatgtcattttcgtcccaaaaaaaaaaaaaaa

SEQ ID NO: 115 - protein, 408 aa, Helianthus annuus
MAPKKSKHELTPKKMKLKKDSKMKLKKKKKKISSSSNPAAAVSGSDNRGVDSEWWISFWDKNPPLPGSMVPEDEEEGFKYFFRVSKKTFEYICSLVREDLISRPPSGLINIEGRLLSVEKQVAIALRRLASGESQVSVGASFGVGQSTVSQVTWRFIEAMEERGRHHLKWPDHDKLQSIKSEFEKTFNLPNCCGAIDATHIVMTLPAVQTSDDWCDQVKNYSMLVQGIVDDKSRFLDIVTGWPGGMTIPKLLKFSGFYKLCESGQRLNGNPISLSNESEIREFIVGGANYPLLPWLITPYSETDEVSGLNTVHEAARSLAVRAFSQLKGSWRILNKVMWRPDKKKLPSIIVVCCLLHNIIIDCGDYVKPDVSLSGHHDLGYVEQWCKQVDPVGRKMRDNLAAHLENIK

SEQ ID NO: 116 - DNA, 28 bp, Artificial sequence
  primer
atagagctcggcgaagaagttggcgaag

SEQ ID NO: 117 - DNA, 31 bp, Artificial sequence
  primer
atacccggggctaaccttcgaagagcaatgg

SEQ ID NO: 118 - DNA, 21 bp, Artificial sequence
  primer
atggctccggtgaagcagaag

SEQ ID NO: 119 - DNA, 22 bp, Artificial sequence
  primer
tcacctaagcaaatgctcagtc

SEQ ID NO: 120 - DNA, 28 bp, Artificial sequence
  primer
ataccatggggcgaagaagttggcgaag

SEQ ID NO: 121 - DNA, 33 bp, Artificial sequence
  primer
atattaattaagctaaccttcgaagagcaatgg

SEQ ID NO: 122 - DNA, 28 bp, Artificial sequence
  primer
ataggtaccggcgaagaagttggcgaag

SEQ ID NO: 123 - DNA, 31 bp, Artificial sequence
  primer
atagtcgacgctaaccttcgaagagcaatgg

SEQ ID NO: 124 - protein, 433 aa, Artificial sequence
  consensus sequence
  Variant (2)..(2): Xaa in position 2 is any amino acid
  Variant (4)..(7): Xaa in position 4 to 7 is any amino acid
  Variant (9)..(12): Xaa in position 9 to 12 is any amino acid
  Variant (13)..(28): Xaa in position 13 to 28 is any or no amino acid
  Variant (30)..(46): Xaa in position 30 to 46 is any amino acid
  Variant (47)..(66): Xaa in position 47 to 66 is any or no amino acid
  Variant (69)..(70): Xaa in position 69 to 70 is any amino acid
  Variant (72)..(84): Xaa in position 72 to 84 is any amino acid
  Variant (85)..(97): Xaa in position 85 to 97 is any or no amino acid
  Variant (99)..(101): Xaa in position 99 to 101 is any amino acid
  Variant (103)..(104): Xaa in position 103 to 104 is any amino acid
  Variant (107)..(107): Xaa in position 107 is any amino acid
  Variant (110)..(110): Xaa in position 110 is any amino acid
  Variant (115)..(115): Xaa in position 115 is any amino acid
  Variant (117)..(118): Xaa in position 117 to 118 is any amino acid
  Variant (120)..(131): Xaa in position 120 to 131 is any amino acid
  Variant (132)..(134): Xaa in position 132 to 134 is any or no amino acid
  Variant (136)..(137): Xaa in position 136 to 137 is any amino acid
  Variant (139)..(140): Xaa in position 139 to 140 is any amino acid
  Variant (142)..(143): Xaa in position 142 to 143 is any amino acid
  Variant (146)..(146): Xaa in position 146 is any amino acid
  Variant (148)..(149): Xaa in position 148 to 149 is any amino acid
  Variant (152)..(152): Xaa in position 152 is any amino acid
  Variant (155)..(155): Xaa in position 155 is any amino acid
  Variant (157)..(160): Xaa in position 157 to 160 is any amino acid
  Variant (162)..(163): Xaa in position 162 to 163 is any amino acid
  Variant (166)..(168): Xaa in position 166 to 168 is any amino acid
  Variant (173)..(174): Xaa in position 173 to 174 is any amino acid
  Variant (179)..(179): Xaa in position 179 is any amino acid
  Variant (181)..(182): Xaa in position 181 to 182 is any amino acid
  Variant (187)..(188): Xaa in position 187 to 188 is any amino acid
  Variant (191)..(191): Xaa in position 191 is any amino acid
  Variant (194)..(198): Xaa in position 194 to 198 is any amino acid
  Variant (199)..(200): Xaa in position 199 to 200 is any or no amino acid
  Variant (203)..(204): Xaa in position 203 to 204 is any amino acid
  Variant (207)..(209): Xaa in position 207 to 209 is any amino acid
  Variant (217)..(218): Xaa in position 217 to 218 is any amino acid
  Variant (220)..(220): Xaa in position 220 is any amino acid
  Variant (224)..(224): Xaa in position 224 is any amino acid
  Variant (226)..(226): Xaa in position 226 is any amino acid
  Variant (228)..(235): Xaa in position 228 to 235 is any amino acid
  Variant (236)..(236): Xaa in position 236 is any or no amino acid
  Variant (238)..(238): Xaa in position 238 is any amino acid
  Variant (240)..(241): Xaa in position 240 to 241 is any amino acid
  Variant (244)..(244): Xaa in position 244 is any amino acid
  Variant (247)..(247): Xaa in position 247 is any amino acid
  Variant (250)..(251): Xaa in position 250 to 251 is any amino acid
  Variant (254)..(256): Xaa in position 254 to 256 is any amino acid
  Variant (259)..(259): Xaa in position 259 is any amino acid
  Variant (261)..(261): Xaa in position 261 is any amino acid
  Variant (263)..(263): Xaa in position 263 is any amino acid
  Variant (269)..(274): Xaa in position 269 to 274 is any amino acid
  Variant (276)..(277): Xaa in position 276 to 277 is any amino acid
  Variant (280)..(281): Xaa in position 280 to 281 is any amino acid
  Variant (286)..(286): Xaa in position 286 is any amino acid
  Variant (288)..(288): Xaa in position 288 is any amino acid
  Variant (291)..(291): Xaa in position 291 is any amino acid
  Variant (293)..(302): Xaa in position 293 to 302 is any amino acid
  Variant (303)..(305): Xaa in position 303 to 305 is any or no amino acid
  Variant (309)..(310): Xaa in position 309 to 310 is any amino acid
  Variant (312)..(314): Xaa in position 312 to 314 is any amino acid
  Variant (322)..(322): Xaa in position 322 is any amino acid
  Variant (326)..(333): Xaa in position 326 to 333 is any amino acid
  Variant (334)..(336): Xaa in position 334 to 336 is any or no amino acid
  Variant (339)..(339): Xaa in position 339 is any amino acid
  Variant (341)..(350): Xaa in position 341 to 350 is any amino acid
  Variant (353)..(354): Xaa in position 353 to 354 is any amino acid
  Variant (357)..(358): Xaa in position 357 to 358 is any amino acid
  Variant (360)..(365): Xaa in position 360 to 365 is any amino acid
  Variant (371)..(373): Xaa in position 371 to 373 is any amino acid
  Variant (376)..(376): Xaa in position 376 is any amino acid
  Variant (379)..(379): Xaa in position 379 is any amino acid
  Variant (388)..(388): Xaa in position 388 is any amino acid
  Variant (391)..(392): Xaa in position 391 to 392 is any amino acid
  Variant (394)..(404): Xaa in position 394 to 404 is any amino acid
  Variant (405)..(405): Xaa in position 405 is any or no amino acid
  Variant (408)..(409): Xaa in position 408 to 409 is any amino acid
  Variant (411)..(414): Xaa in position 411 to 414 is any amino acid
  Variant (416)..(418): Xaa in position 416 to 418 is any amino acid
  Variant (420)..(425): Xaa in position 420 to 425 is any amino acid
  Variant (427)..(432): Xaa in position 427 to 432 is any amino acid
MXPXXXXKXXXXXXXXXXXXXXXXXXXXKXXXXXXXXXXXXXXXXXXXXXXXXXXXXXXXXXXXXXWWXXFXXXXXXXXXXXXXXXXXXXXXXXXXXFXXXFXXSRXTFXYICSXVXXDXXXXXXXXXXXXXXXGXXLXXEXXVAXAXXRLXSGXSXXXXGXXFGXXXSTVSXXTWRFXEXXEERAXXHLXWPXXXXXXXIKXXFEXXXGLPNCCGXXDXTHIXMXLXXXXXXXXXWXDXXKNXSMXLQXXVDXXXRFXDXVXGWPGSXXXXXXLXXSGXXKLCEXGXRLXGXXXXXXXXXXXXXREYXXGXXXYPLLPWLXTPYXXXXXXXXXXXFNXRXXXXXXXXXXALXXLKXXWXXXXXXMWRPDXXXLPXIIXVCCLLHNIXIDXXDXXXXXXXXXXXXHDXXYXXXXCXXXDXXXXXXRXXXXXXL

SEQ ID NO: 125 - protein, 57 aa, Artificial sequence
  protein pattern
  Variant (2)..(2): Xaa in position 2 is Cys, Ser or Thr
  Variant (3)..(3): Xaa in position 3 is Leu or Val
  Variant (4)..(4): Xaa in position 4 is Glu or Asn
  Variant (5)..(5): Xaa in position 5 is Asp or Lys
  Variant (6)..(6): Xaa in position 6 is Gln or Arg
  Variant (9)..(9): Xaa in position 9 is Ile or Val
  Variant (11)..(11): Xaa in position 11 is Leu or Met
  Variant (12)..(12): Xaa in position 12 is any amino acid
  Variant (15)..(15): Xaa in position 15 is Ala, Gly or Asn
  Variant (18)..(18): Xaa in position 18 is Asp, Glu or Gly
  Variant (20)..(20): Xaa in position 20 is any amino acid
  Variant (21)..(21): Xaa in position 21 is any or no amino acid
  Variant (23)..(23): Xaa in position 23 is any amino acid
  Variant (24)..(24): Xaa in position 24 is any or no amino acid
  Variant (26)..(26): Xaa in position 26 is Ala, Glu, Ser or Thr
  Variant (27)..(27): Xaa in position 27 is Ala, Ser or Thr
  Variant (28)..(28): Xaa in position 28 is Phe or Val
  Variant (30)..(30): Xaa in position 30 is Met or Val
  Variant (31)..(31): Xaa in position 31 is Gly or Asn
  Variant (32)..(32): Xaa in position 32 is any amino acid
  Variant (37)..(37): Xaa in position 37 is any amino acid
  Variant (38)..(38): Xaa in position 38 is Ile or Val
  Variant (43)..(43): Xaa in position 43 is Ile or Val
  Variant (45)..(45): Xaa in position 45 is Ala or Ser
  Variant (46)..(46): Xaa in position 46 is Leu or Met
  Variant (48)..(48): Xaa in position 48 is Asp or Glu
  Variant (50)..(50): Xaa in position 50 is Ala or Gly
  Variant (51)..(51): Xaa in position 51 is any amino acid
  Variant (52)..(52): Xaa in position 52 is His or Tyr
  Variant (55)..(55): Xaa in position 55 is any amino acid
LXXXXXVAXAXXRLXSGXSXXVXXGXXXGXXXSTVSXXTWRFXEXXEXRXXXHLXWP

SEQ ID NO: 126 - protein, 39 aa, Artificial sequence
  protein pattern
  Variant (2)..(2): Xaa in position 2 is any amino acid
  Variant (3)..(4): Xaa in position 3 to 4 is any or no amino acid
  Variant (7)..(7): Xaa in position 7 is Asp, Glu or Gly
  Variant (8)..(8): Xaa in position 8 is any amino acid
  Variant (10)..(10): Xaa in position 10 is any amino acid
  Variant (11)..(11): Xaa in position 11 is Ile or Val
  Variant (12)..(12): Xaa in position 12 is Ile or Leu
  Variant (13)..(15): Xaa in position 13 to 15 is any amino acid
  Variant (16)..(16): Xaa in position 16 is Leu or Met
  Variant (18)..(18): Xaa in position 18 is any amino acid
  Variant (21)..(21): Xaa in position 21 is Lys or Arg
  Variant (22)..(22): Xaa in position 22 is any amino acid
  Variant (23)..(23): Xaa in position 23 is Lys or Arg
  Variant (26)..(26): Xaa in position 26 is Arg or Ser
  Variant (29)..(29): Xaa in position 29 is any amino acid
  Variant (34)..(34): Xaa in position 34 is Ile or Leu
  Variant (35)..(35): Xaa in position 35 is any amino acid
  Variant (38)..(38): Xaa in position 38 is any or no amino acid
AXXXLKXXWXXXXXXXWXPDXXXLPXIIXVCCLXXNIXI

SEQ ID NO: 127 - protein, 41 aa, Artificial sequence
  protein pattern
  Variant (2)..(2): Xaa in position 2 is Ala, Asn or Ser
  Variant (3)..(3): Xaa in position 3 is Cys, Asn, Ser or Val
  Variant (4)..(4): Xaa in position 4 is any amino acid
  Variant (5)..(5): Xaa in position 5 is Ala, Ser, Thr or Val
  Variant (6)..(7): Xaa in position 6 to 7 is any amino acid
  Variant (9)..(10): Xaa in position 9 to 10 is any amino acid
  Variant (11)..(13): Xaa in position 11 to 13 is any or no amino acid
  Variant (16)..(16): Xaa in position 16 is any or no amino acid
  Variant (19)..(19): Xaa in position 19 is any amino acid
  Variant (20)..(20): Xaa in position 20 is Leu or Val
  Variant (22)..(22): Xaa in position 22 is Ala or Gly
  Variant (23)..(23): Xaa in position 23 is Ile or Val
  Variant (24)..(24): Xaa in position 24 is Phe, Ile or Val
  Variant (25)..(25): Xaa in position 25 is Asp or Ser
  Variant (26)..(28): Xaa in position 26 to 28 is any amino acid
  Variant (29)..(29): Xaa in position 29 is Lys or Arg
  Variant (31)..(31): Xaa in position 31 is any amino acid
  Variant (32)..(32): Xaa in position 32 is Asp or Asn
  Variant (33)..(33): Xaa in position 33 is Ile, Met or Val
  Variant (34)..(34): Xaa in position 34 is Ile or Val
  Variant (35)..(35): Xaa in position 35 is Ala, Ser or Thr
  Variant (40)..(40): Xaa in position 40 is Gly or Ser
  Variant (41)..(41): Xaa in position 41 is Leu or Met
PXXXXXXDXXXXXKNXSMXXQXXXXXXXXFXXXXXGWPGXX

SEQ ID NO: 128 - protein, 27 aa, Artificial sequence
  protein pattern
  Variant (3)..(3): Xaa in position 3 is Ala, Ser or Thr
  Variant (4)..(4): Xaa in position 4 is any amino acid
  Variant (5)..(5): Xaa in position 5 is Phe or Leu
  Variant (6)..(6): Xaa in position 6 is Asp or Glu
  Variant (7)..(9): Xaa in position 7 to 9 is any amino acid
  Variant (10)..(10): Xaa in position 10 is Gly or Asn
  Variant (17)..(17): Xaa in position 17 is Ala, Gly or Val
  Variant (18)..(18): Xaa in position 18 is Ile or Val
  Variant (20)..(20): Xaa in position 20 is any or no amino acid
  Variant (22)..(22): Xaa in position 22 is any or no amino acid
  Variant (24)..(24): Xaa in position 24 is Ile or Val
  Variant (25)..(25): Xaa in position 25 is any amino acid
  Variant (27)..(27): Xaa in position 27 is Cys, Asn or Thr
IKXXXXXXXXLPNCCGXXDXTXHXXMX

SEQ ID NO: 129 - protein, 22 aa, Artificial sequence
  protein pattern
  Variant (2)..(2): Xaa in position 2 is Asp or Glu
  Variant (3)..(3): Xaa in position 3 is Phe or Tyr
  Variant (4)..(4): Xaa in position 4 is Ile, Leu or Val
  Variant (5)..(5): Xaa in position 5 is Ala, Leu or Val
  Variant (7)..(7): Xaa in position 7 is Asp, Gly or Asn
  Variant (8)..(8): Xaa in position 8 is any amino acid
  Variant (9)..(9): Xaa in position 9 is Cys, Gly, Asn or Ser
  Variant (10)..(10): Xaa in position 10 is Phe or Tyr
  Variant (17)..(17): Xaa in position 17 is Ile, Leu or Met
  Variant (20)..(20): Xaa in position 20 is Phe, His or Tyr
  Variant (21)..(21): Xaa in position 21 is Asp, Glu, Gln, Arg or Ser
  Variant (22)..(22): Xaa in position 22 is Glu, Gly or Ser
RXXXXGXXXXPLLPWLXTPXXX

SEQ ID NO: 130 - protein, 35 aa, Artificial sequence
  protein pattern
  Variant (2)..(4): Xaa in position 2 to 4 is any amino acid
  Variant (5)..(5): Xaa in position 5 is any or no amino acid
  Variant (7)..(8): Xaa in position 7 to 8 is any amino acid
  Variant (9)..(9): Xaa in position 9 is any or no amino acid
  Variant (11)..(15): Xaa in position 11 to 15 is any amino acid
  Variant (16)..(16): Xaa in position 16 is any or no amino acid
  Variant (19)..(19): Xaa in position 19 is Asp, Glu, Asn or Ser
  Variant (21)..(21): Xaa in position 21 is Ile or Leu
  Variant (23)..(23): Xaa in position 23 is Gly or Ser
  Variant (24)..(24): Xaa in position 24 is Ile or Leu
  Variant (25)..(25): Xaa in position 25 is Ile or Val
  Variant (26)..(26): Xaa in position 26 is any amino acid
  Variant (27)..(27): Xaa in position 27 is Ala, Asp, Glu or Gly
  Variant (28)..(28): Xaa in position 28 is Asp or Glu
  Variant (29)..(29): Xaa in position 29 is Phe, Leu or Met
  Variant (30)..(31): Xaa in position 30 to 31 is any amino acid
  Variant (32)..(32): Xaa in position 32 is Lys or Arg
  Variant (33)..(33): Xaa in position 33 is Pro, Ser or Thr
  Variant (34)..(34): Xaa in position 34 is any amino acid
  Variant (35)..(35): Xaa in position 35 is Asn or Ser
DXXXXFXXXFXXXXXXTFXYXCXXXXXXXXXXXXX

SEQ ID NO: 131 - protein, 38 aa, Artificial sequence
  protein pattern
  Variant (2)..(9): Xaa in position 2 to 9 is any amino acid
  Variant (10)..(12): Xaa in position 10 to 12 is any or no amino acid
  Variant (15)..(16): Xaa in position 15 to 16 is any amino acid
  Variant (18)..(18): Xaa in position 18 is any amino acid
  Variant (19)..(19): Xaa in position 19 is Asp, Glu, Gln or Arg
  Variant (20)..(20): Xaa in position 20 is Glu, Gln or Arg
  Variant (21)..(21): Xaa in position 21 is any amino acid
  Variant (23)..(25): Xaa in position 23 to 25 is any amino acid
  Variant (26)..(26): Xaa in position 26 is Asp, Glu or Asn
  Variant (27)..(27): Xaa in position 27 is Glu or Pro
  Variant (28)..(28): Xaa in position 28 is any amino acid
  Variant (29)..(29): Xaa in position 29 is Ala, Gly or Ser
  Variant (30)..(31): Xaa in position 30 to 31 is any amino acid
  Variant (32)..(32): Xaa in position 32 is Ile, Leu, Met or Val
  Variant (34)..(34): Xaa in position 34 is Asp, Glu or Gly
  Variant (35)..(35): Xaa in position 35 is any amino acid
  Variant (36)..(36): Xaa in position 36 is Ile or Leu
  Variant (37)..(37): Xaa in position 37 is Ala, Ser or Thr
  Variant (38)..(38): Xaa in position 38 is Ala, Asp, Glu, Gly, Asn or Gln
DXXXXXXXXXXXHDXXYXXXXCXXXXXXXXXXRXXXXX

SEQ ID NO: 132 - DNA, 2646 bp, Arabidopsis thaliana
  CDS (1)..(2646)
atgggctcgaagccttggctacatccagctcctcagtataaaaccctagaaaccttttgggatgatgaagacgatgctcctggtcctagatgcgctcatacacttacggctgttgcagctactaagactcacggtcctcgtcttattctcttcggcggcgccaccgctattgagggagggagttcttccgttcctgggatcaggttagctggtgttaccaatacggtgcattcttatgatattctcactaggaagtggacaaggcttaaaccggctggtgagcctccgtctcctagggctgctcacgccgcagctgcagttggcaccatggtcgtttttcagggtggcattggaccggcggggcattctactgatgatctttacgttcttgacatgactaatgataagttcaagtggcacagggtggtggttcaaggggatggtccaggccctcgctatggccatgttatggatttagtttctcagaggtatcttgttacagtcaccggaaatgatgggaaacgagctctttctgacgcttgggcactggatacagctcagaaaccatatgtatggcagagattgaacccagatggtgaccgaccaagtgctagaatgtatgcttctggcagtgctcgttctgatggcatgtttttgctctgcgggggaagagacaccttgggggcgccgttgggagatgcttatgggctactgatgcatagaaatggtcagtgggagtggactctggctccaggtgtagctccttctccaagatatcaacatgcagcggtttttgtaggtgcaagattacatgtcagtggtggtgtgctgagaggaggccgtgtaatagacgctgaagcatctgttgcagtgcttgatactgctgccggtgtatggttggatagaaatgggcaagttacttctgcacgtggaagtaagggacaaatcgatcaagatccgtcttttgaacttatgcgacgctgtcgccatggcgcggcatcagttggtatccggatctatgtgcatggtggtctaagaggagatgtgttacttgacgattttctagttgctgaaaattcaacattccagtcagacatcagttctcctttgctagcatcagatagaacccaacaaagttctactcccaggttttcttatgccgcacgacctccttcaggctctgaaccaagcttctccatgtctgagggactgagcttggatgaaaattcgttggagaaattgacggaggcttctgcagctgaagcagaggtagctagttctgtttggcgagctgcacaactaggagctggtactctggatgaagaaccctctacctctgatgccagctcgccaattgtagaatctactactgatggtaccgcaaatgaaggagatgtcaggcttcatccgagagctgttgtggtagcaaaagagacggttggtagtctgggcggcatggtaagacagctaagcttggatcagtttcagaatgagagccgacggatggttcccatgaacaatagcgatgtgccacaacctaccaagaagttcacgagacagaagtctccgcaaggcctgcataaaaaggtcattgctgctttgttaagacctcgaaactggaaacctcctggcaataggaaatttttcttggattcttacgaagttggggaactctgttatgctgccgaacaaatatttatgcatgaacaaacggttcttcagctaaaggctcctatcaaagtatttggcgatctccatgggcaatttggcgatttaatgcgtttatttgatgaatatggatttccctcaacagctggagacatcacgtatattgactatttattcttgggagattacgttgaccggggacaacacagcctggagactataacgttgctgcttgcattgaagattgaatatccggagaatgttcacttgattcgtggaaaccacgaggctgctgacattaatgcactatttggtttccgtcttgaatgcatagaaagaatgggagagaatgatggcatctgggcgtggacaagatttaatcaactttttaattatcttcctcttgctgcactaatcgagaacaaaattatatgtatgcatggtggaattgggaggtcaatcagtacagtggaacagattgaaaagattgaaagacccataacaatggatgctggatcccttgttctaatggatttattatggtctgatcctacagagaacgatagtatcgagggtttaagaccaaacgccagaggacctggccttgtcacgtttgggcctgatagagtcacagaattctgtaagaggaataaactacagctaattatcagggcccatgaatgtgtgatggatggattcgaaagatttgcacagggacagttgattacgcttttctccgccacaaattactgcggaactgcgaacaatgcaggagctatattggtggttggcagaggattggtgattgttcccaagttaattcatcctcttccacctcccatcttatctccagagaactctccagaacattctggagacgacgcttggatgcaggagctgaatatccagagaccgccgactccaacacgaggcaggccacaaccagattttgacagaagctcgcttgcatacatctga

SEQ ID NO: 133 - protein, 881 aa, Arabidopsis thaliana
MGSKPWLHPAPQYKTLETFWDDEDDAPGPRCAHTLTAVAATKTHGPRLILFGGATAIEGGSSSVPGIRLAGVTNTVHSYDILTRKWTRLKPAGEPPSPRAAHAAAAVGTMVVFQGGIGPAGHSTDDLYVLDMTNDKFKWHRVVVQGDGPGPRYGHVMDLVSQRYLVTVTGNDGKRALSDAWALDTAQKPYVWQRLNPDGDRPSARMYASGSARSDGMFLLCGGRDTLGAPLGDAYGLLMHRNGQWEWTLAPGVAPSPRYQHAAVFVGARLHVSGGVLRGGRVIDAEASVAVLDTAAGVWLDRNGQVTSARGSKGQIDQDPSFELMRRCRHGAASVGIRIYVHGGLRGDVLLDDFLVAENSTFQSDISSPLLASDRTQQSSTPRFSYAARPPSGSEPSFSMSEGLSLDENSLEKLTEASAAEAEVASSVWRAAQLGAGTLDEEPSTSDASSPIVESTTDGTANEGDVRLHPRAVVVAKETVGSLGGMVRQLSLDQFQNESRRMVPMNNSDVPQPTKKFTRQKSPQGLHKKVIAALLRPRNWKPPGNRKFFLDSYEVGELCYAAEQIFMHEQTVLQLKAPIKVFGDLHGQFGDLMRLFDEYGFPSTAGDITYIDYLFLGDYVDRGQHSLETITLLLALKIEYPENVHLIRGNHEAADINALFGFRLECIERMGENDGIWAWTRFNQLFNYLPLAALIENKIICMHGGIGRSISTVEQIEKIERPITMDAGSLVLMDLLWSDPTENDSIEGLRPNARGPGLVTFGPDRVTEFCKRNKLQLIIRAHECVMDGFERFAQGQLITLFSATNYCGTANNAGAILVVGRGLVIVPKLIHPLPPPILSPENSPEHSGDDAWMQELNIQRPPTPTRGRPQPDFDRSSLAYI

SEQ ID NO: 134 - DNA, 2439 bp, Arabidopsis thaliana
  CDS (1)..(2439)
atggagacgaaggcgattggatttcaccacctttctccaccacaaaatattgtgttatggctcctgatcaatcttatcaatatccatctccttcgtatgaatcgatacagaccttttacgatacctgatgaggattggccgggtcctagatgcggccatactctcacggcggttttcgtcaacaattcccatcagcttatcctcttcggcggcagtactactgccgtcgccaaccataactcctccttacccgagatcagtttagatggcgtcaccaattcggtccattcttttgatgttttgaccaggaagtggacaaggcttaatccgattggtgacgttccgtctcccagggcttgtcatgctgccgctttatatggcaccttgatccttattcagggtgggattggtccatccggaccttctgatggagatgtctacatgcttgacatgactaataacaagtggattaagtttctggttggaggggagactccaagccctcgctatggccatgttatggatatagctgctcagaggtggcttgtcatattcagcgggaataatggaaatgaaattctggatgatacatgggcattggacacgcgtggaccattttcatgggacagattgaacccgtctggcaatcagccaagtgggagaatgtatgcttcaggtagttctcgagaagatggtatttttttgctctgcggtggaatagatcactcaggagtgacactgggagatacttacgggctgaaaatggatagcgataatgtttggactcctgttccagctgtagctccttccccgagatatcaacatactgcggttttcggaggttcaaaactgcatgtcattgggggtatactgaatagggctcgcctaatcgatggtgaagcagttgttgctgtgcttgatactgagactggtgaatgggtagataccaatcaaccagagacctctgcgagcggcgccaatagacaaaatcaatatcaacttatgcgacgttgtcaccatgctgctgcatcgtttggcagccacctatatgtgcatggcgggattagagaagatgtattgctcgacgatttgctagttgctgaaacatcccagtcttcaagtcctgaaccagaagaagataatcctgataattatatgttgctcgacgactatctaatggatgaacctaagcctttaagttctgaaccagaagcttcatcctttataatgaggagcacaagtgaaattgcgatggatagattggcagaggcacataacttaccaactatcgaaaatgctttttatgatagtgctattgaaggatacgttccacttcaacatggagctgagacggttggaaatcgaggtggcttggtgagaactgcaagcttggatcaatctactcaagacttgcataagaaggtcatttcgacactgttgagacctaaaacctggacgcctcctgccaacagagattttttcttgagttatttagaagttaagcatttgtgcgatgaggtagagaaaatatttatgaatgaaccaacacttcttcagctcaaagttccaatcaaagtcttcggcgatatccatggacaatacggggatttgatgcgtttatttcatgaatatggacatccttcagtggaaggagatatcacccatatagactatttgtttttgggagattatgttgaccgtggacaacacagcttggagatcatcatgttgctgtttgctttgaagatagaatatccgaagaacatccacttgattcgtggaaatcatgagtctcttgcaatgaatagaatttatggttttcttacagaatgcgaagaaagaatgggcgagtcctatgggttcgaagcatggttaaagattaatcaagtttttgattatcttccgcttgctgcacttctagaaaagaaagttttgtgtgtccatggcggaattgggagggcagttacgatcgaagaaattgaaaatatcgaaaggccggcattcccggatactggatcaatggtcttgaaagacatcttatggtcagatcctacgatgaatgacactgttttgggtatagtagacaatgccagaggagaaggtgttgtctcatttgggcctgatatagtcaaggcatttctagaaaggaatggtctggagatgatactaagagcacacgagtgtgttattgacggctttgaaagattcgctgacggacggcttataacagtcttttctgctacaaattactgtggaactgcacaaaatgcgggagcaatattggtaattggtagagatatggtaatttatcctaagctgattcatcctcaccctcctcccatctcatcttcagaagaagactatacagacaaagcatggatgcaggagctgaacatcgagatgccgcctactccagctcgaggggagtcaagtgaataa

SEQ ID NO: 135 - protein, 812 aa, Arabidopsis thaliana
METKAIGFHHLSPPQNIVLWLLINLINIHLLRMNRYRPFTIPDEDWPGPRCGHTLTAVFVNNSHQLILFGGSTTAVANHNSSLPEISLDGVTNSVHSFDVLTRKWTRLNPIGDVPSPRACHAAALYGTLILIQGGIGPSGPSDGDVYMLDMTNNKWIKFLVGGETPSPRYGHVMDIAAQRWLVIFSGNNGNEILDDTWALDTRGPFSWDRLNPSGNQPSGRMYASGSSREDGIFLLCGGIDHSGVTLGDTYGLKMDSDNVWTPVPAVAPSPRYQHTAVFGGSKLHVIGGILNRARLIDGEAVVAVLDTETGEWVDTNQPETSASGANRQNQYQLMRRCHHAAASFGSHLYVHGGIREDVLLDDLLVAETSQSSSPEPEEDNPDNYMLLDDYLMDEPKPLSSEPEASSFIMRSTSEIAMDRLAEAHNLPTIENAFYDSAIEGYVPLQHGAETVGNRGGLVRTASLDQSTQDLHKKVISTLLRPKTWTPPANRDFFLSYLEVKHLCDEVEKIFMNEPTLLQLKVPIKVFGDIHGQYGDLMRLFHEYGHPSVEGDITHIDYLFLGDYVDRGQHSLEIIMLLFALKIEYPKNIHLIRGNHESLAMNRIYGFLTECEERMGESYGFEAWLKINQVFDYLPLAALLEKKVLCVHGGIGRAVTIEEIENIERPAFPDTGSMVLKDILWSDPTMNDTVLGIVDNARGEGVVSFGPDIVKAFLERNGLEMILRAHECVIDGFERFADGRLITVFSATNYCGTAQNAGAILVIGRDMVIYPKLIHPHPPPISSSEEDYTDKAWMQELNIEMPPTPARGESSE

SEQ ID NO: 136 - DNA, 3057 bp, Arabidopsis thaliana
  CDS (1)..(3057)
atggatgaagattcgtctatggtggctgacaacgatcaggatcgtgagtttcagagccttgatggaggccaatctccttcgcctatggaaagagaaacgcctcagcagatgaacgaccaatcacctcctcctgaaggcggatcggtgcctacgccgccgccttcggatcctaatccggcaacttctcagcagcaagcggctgcggttgttggacaagagcagcagccggcgctagttgttggtccgaggtgtgcacctacgtattcggtggtggatgctatgatggataaaaaagaggatgggcctggccctaggtgtggtcacaccttgacggctgtgcctgctgttggtgatgaaggaacgcctggttatattggtcctcgtcttgtattgtttggtggtgcgacggctcttgagggaaattctggtggcaccggaactcctacttcagctggaagtgccggcattcggctagctggggcaactgctgatgttcattgttatgatgtactttctaataagtggactaggcttacaccttttggagaaccaccaaccccgagggccgcacatgttgcaactgcagtcgggaccatggtagttattcagggtggaattggtcctgctggtttatcggctgaagaccttcatgttcttgatctcactcaacaacggccacgatggcacagggttgttgttcagggtcctggaccaggacctcgttatggacatgtcatggcactcgtggggcaaaggtatctcatggcaattggtggaaatgatggaaaacgtccacttgctgatgtatgggccttggatactgccgccaagccttatgaatggcgtaagttggaaccagaaggggaaggtccacctccctgcatgtatgcaactgcaagtgcgcgctccgatggtcttcttctcctctgtggtggaagggatgcaaacagtgtgcctctggccagtgcatatggacttgcgaagcacagagatggacgttgggaatgggccatagcccctggtgtctcaccatcttccagatatcagcatgcagcagtctttgtaaatgcaagacttcatgtgtccggtggggcacttggtggtggacgcatggttgaagactcatccagtgttgcagtattggatactgcagcaggtgtatggtgtgatacaaaatcagttgttactagtcctagaactggtaggtatagtgccgatgcagctggtggcgatgcttcggttgagctgactaggcggtgtaggcatgctgctgctgcagtcggtgatttgatatttatctacggtggtttacgtggaggggtgttactcgatgacttattggttgctgaagatcttgctgctgcggaaacaacatatgctgcttctcatgctgctgcagctgcggcaacaaattctccaccaggtcgattacctggaaggtatggtttttcagatgaaaggaacagggagttatctgaatcagctgctgatggcgctgtggtgctgggaagccctgttgcaccccctgtaaatggtgatatgcatactgatattagccctgaaaatgcattacttccaggaactcggagaacgaataagggtgtggagtatcttgttgaagcatcagcagcggaagctgaggcgatcagtgcgacgttggctgctgccaaggcaagacaagtcaatggtgaagttgaactccctgatagggattgtggtgcagaggctacacccagtgggaaacctacattttcgctaatcaagccagattctatgggctcaatgagtgttacacctgcagggattcgtcttcatcatagagctgtggtggttgctgctgaaactggtggcgccttaggtggaatggttagacagttatccattgatcaatttgaaaatgagggacggcgtgtcagttatgggacaccagaaagtgcaacagcagcaaggaaactattagatcgacaaatgtcaatcaacagtgttccaaagaaggttatagctcatcttttgaagcctcgtggttggaagcctcctgttcgacggcagtttttcctagattgcaatgaaatagctgatctttgtgatagtgcagaacgtatcttcgcaagtgaaccgactgtattacagcttaaagctcctatcaaaatatttggtgatctgcatgggcagtttggggatcttatgcgcctttttgatgaatatggttcaccatctacagctggagacatatcatatatcgactacctcttcttaggggactatgttgatcggggtcaacacagtctagaaacaatctcccttctacttgcactaaaggttgagtaccagcataatgtacacttaattcggggaaaccatgaagctgcagatatcaatgccctttttggcttccggatagagtgtattgagcgaatgggtgaacgtgatggaatctgggtgtggcaccgaataaatcgtttattcaattggctacctcttgctgcatcgattgagaagaaaattatctgtatgcatgggggtattggtcgttctataaatcatgtggagcagatagaaaatattcaacgtccaattacaatggaagctggctccattgttcttatggatttattatggtcggatccaactgaaaatgacagtgtcgaaggtttaaggcccaatgctagaggccctggattggttacttttgggcctgaccgtgtcatggagttctgcaacaacaacgatcttcagttgattgtacgagcacacgaatgcgtaatggatggatttgagcgttttgctcaggggcatttgataacgctcttttctgctacaaactattgtggtactgcaaacaatgctggggctatcttggtactagggagagatcttgtagtggtacctaagctcattcatccgttacctccagcactttcatcgcctgaaacttcaccagaaagacatatagaagacacatggatgcaggagctgaacgcaaataggccagcgacgccaacccgaggacgcccacaaaattcaaatgaccgaggaggttctctggcttggatgtga

SEQ ID NO: 137 - protein, 1018 aa, Arabidopsis thaliana
MDEDSSMVADNDQDREFQSLDGGQSPSPMERETPQQMNDQSPPPEGGSVPTPPPSDPNPATSQQQAAAVVGQEQQPALVVGPRCAPTYSVVDAMMDKKEDGPGPRCGHTLTAVPAVGDEGTPGYIGPRLVLFGGATALEGNSGGTGTPTSAGSAGIRLAGATADVHCYDVLSNKWTRLTPFGEPPTPRAAHVATAVGTMVVIQGGIGPAGLSAEDLHVLDLTQQRPRWHRVVVQGPGPGPRYGHVMALVGQRYLMAIGGNDGKRPLADVWALDTAAKPYEWRKLEPEGEGPPPCMYATASARSDGLLLLCGGRDANSVPLASAYGLAKHRDGRWEWAIAPGVSPSSRYQHAAVFVNARLHVSGGALGGGRMVEDSSSVAVLDTAAGVWCDTKSVVTSPRTGRYSADAAGGDASVELTRRCRHAAAAVGDLIFIYGGLRGGVLLDDLLVAEDLAAAETTYAASHAAAAAATNSPPGRLPGRYGFSDERNRELSESAADGAVVLGSPVAPPVNGDMHTDISPENALLPGTRRTNKGVEYLVEASAAEAEAISATLAAAKARQVNGEVELPDRDCGAEATPSGKPTFSLIKPDSMGSMSVTPAGIRLHHRAVVVAAETGGALGGMVRQLSIDQFENEGRRVSYGTPESATAARKLLDRQMSINSVPKKVIAHLLKPRGWKPPVRRQFFLDCNEIADLCDSAERIFASEPTVLQLKAPIKIFGDLHGQFGDLMRLFDEYGSPSTAGDISYIDYLFLGDYVDRGQHSLETISLLLALKVEYQHNVHLIRGNHEAADINALFGFRIECIERMGERDGIWVWHRINRLFNWLPLAASIEKKIICMHGGIGRSINHVEQIENIQRPITMEAGSIVLMDLLWSDPTENDSVEGLRPNARGPGLVTFGPDRVMEFCNNNDLQLIVRAHECVMDGFERFAQGHLITLFSATNYCGTANNAGAILVLGRDLVVVPKLIHPLPPALSSPETSPERHIEDTWMQELNANRPATPTRGRPQNSNDRGGSLAWM

SEQ ID NO: 138 - DNA, 3021 bp, Arabidopsis thaliana
  CDS (1)..(3021)
atggatttggattcttcaatggtaccagagaatgatcaagatcctattgctacgtctgagaatcaatctcctatggaggagaaagaagaagcgtctgagcaacaaaccggatccgaatccgaatcggcgtctttgactccttctcttcctcctccttcgcagcaacaacaacaacagcagcaacagccgcaggtaacggcggtggttggtccgagatgtgcgccaacgtattcggttgtgaatgctataatcgagaagaaagaagatggtcctggtcctagatgtggacatacgctgacggcggttcctgctgttggtgaagaagggacgtcttcttatattggcccgagactgatcttgtttggtggtgctactgctcttgagggtaattctggaggaacgggaacacctacttcagctggaagtgctggcattcggttagctggtgcaaccgctgatgttcattgttatgatgttctttctaataagtggtcgaggcttacaccttatggagaaccacctagtccaagagctgctcatgttgctactgctgttgggaccatggtagtaattcaggggggaataggtcctgctggtttatcagctgaggatcttcacgttcttgatctcacacagcaacggccacgatggcacagggttgttgttcagggtcctggaccaggaccacgttatggacatgtcatggcactggtaggacagaggtatctcatggcaattggtggaaatgatgggaaacgtccattagctgatgtatgggctttggacactgctgccaaaccttatgaatggcgtaagctggaaccggaaggggaaggtccaccaccatgcatgtatgcaactgcaagtgcgcgatctgatggccttcttcttctctgtggtggaagagatgcgaatagtgtgcccctagcaagtgcatatggacttgccaagcacagagatggacgttgggaatgggccatagccccaggtgtctccccttctgccagataccagcatgctgcagtctttgtaaatgcaagactccatgtctctggtggggcacttggtggtggacgcatggtagaagactcgtccagtgttgcagtgttggatactgcagcaggtgtttggtgtgatacaaaatcggttgttactagtcctagaactggtaggtatagtgctgacgcagctggtggtgatgcttctgttgagctgactaggcgatgcaggcatgctgctgctgcagtgggtgatttgatattcatctatggtgggttgcgtggaggagttttacttgatgacctattggttgctgaagatcttgctgcagcggaaacaacatctgctgcctctcatgctgctgctgcagcagcagcaacaaacacgccacctggccgttcacctggaagatatggattttctgatgaaaggacaggggagctaccagaatcagctcctgacgctgtggtgctgggaagccctgttgcaccccctgtaaatggtgatatgtatactgatattagcactgaaaatgcaatggttccaggaattcggagaacaagcaagggtgtggagtatcttgttgaagcatctgctgcggaagccgaggctatcagtgcaacattagctgctgcgaaggcacgacaggtcaatggggaagttgaacttccagatagggatcgtggtgctgaggctacgcccagtggaaaaccttcattatcattgattaagcctgattctgcagtaccaaatagtgttattcctgcaggggttcgacttcatcatagagctgtggtggttgctgcagaaacaggtggagccttaggtggaatggttagacagttatccattgatcaatttgaaaatgagggacgccgtgttagttatgggacacccgaaagtgcaacagcagctaggaaattattagatcgtcagatgtcaatcaatagtgttccgaaaaaggttgtagctcatcttttgaagcctcgggggtggaagcctccagttcgtcgccagtttttcttggattgcaatgaaatagctgatctttgcgacagtgcagaacgtatcttctcaagcgaacctactgtgttacagcttaaagctcctattaagatatttggtgatttgcatggccagtttggggatctcatgcgcctttttgatgaatatggttcaccatcaacagctggagacatatcatacatcgattacctcttcttaggagactatgttgatcggggtcaacacagcctagagacaattacacttctgcttgctttaaaggttgaataccaacataacgtacacctgattcgtggaaatcatgaagctgccgacattaatgcactttttggtttccggatagagtgtattgagcgaatgggtgaacgtgatgggatctgggtgtggcatcgaataaaccgtttattcaattggctacctctggctgcactgattgagaagaaaatcatctgtatgcatgggggaattggtcggtcgataaatcatgtggagcagatagaaaatatccaacgtccaattacgatggaagcaggctcaattgtacttatggatttattatggtcggatccaactgaaaatgacagtgtcgaaggtttaaggcccaatgctagaggccctgggttggttacttttgggcctgaccgtgtcatggagttttgcaacaacaatgatctgcaattgattgtacgtgcgcatgaatgcgtgatggacggatttgagcgttttgcccaaggtcatttgataacgctcttttcggcaacaaattattgtggtaccgcaaacaatgccggggctatcttggtgttggggagagatcttgtggtggttcctaagcttatccatccattgcctccagcgataacctcacctgaaacttcaccagaaagacatatagaggatacatggatgcaggagttaaacgtaaatagaccaccaacaccaacaagaggacgcccacaaaatccaaatgaccgcggctctcttgcttggatataa

SEQ ID NO: 139 - protein, 1006 aa, Arabidopsis thaliana
MDLDSSMVPENDQDPIATSENQSPMEEKEEASEQQTGSESESASLTPSLPPPSQQQQQQQQQPQVTAVVGPRCAPTYSVVNAIIEKKEDGPGPRCGHTLTAVPAVGEEGTSSYIGPRLILFGGATALEGNSGGTGTPTSAGSAGIRLAGATADVHCYDVLSNKWSRLTPYGEPPSPRAAHVATAVGTMVVIQGGIGPAGLSAEDLHVLDLTQQRPRWHRVVVQGPGPGPRYGHVMALVGQRYLMAIGGNDGKRPLADVWALDTAAKPYEWRKLEPEGEGPPPCMYATASARSDGLLLLCGGRDANSVPLASAYGLAKHRDGRWEWAIAPGVSPSARYQHAAVFVNARLHVSGGALGGGRMVEDSSSVAVLDTAAGVWCDTKSVVTSPRTGRYSADAAGGDASVELTRRCRHAAAAVGDLIFIYGGLRGGVLLDDLLVAEDLAAAETTSAASHAAAAAAATNTPPGRSPGRYGFSDERTGELPESAPDAVVLGSPVAPPVNGDMYTDISTENAMVPGIRRTSKGVEYLVEASAAEAEAISATLAAAKARQVNGEVELPDRDRGAEATPSGKPSLSLIKPDSAVPNSVIPAGVRLHHRAVVVAAETGGALGGMVRQLSIDQFENEGRRVSYGTPESATAARKLLDRQMSINSVPKKVVAHLLKPRGWKPPVRRQFFLDCNEIADLCDSAERIFSSEPTVLQLKAPIKIFGDLHGQFGDLMRLFDEYGSPSTAGDISYIDYLFLGDYVDRGQHSLETITLLLALKVEYQHNVHLIRGNHEAADINALFGFRIECIERMGERDGIWVWHRINRLFNWLPLAALIEKKIICMHGGIGRSINHVEQIENIQRPITMEAGSIVLMDLLWSDPTENDSVEGLRPNARGPGLVTFGPDRVMEFCNNNDLQLIVRAHECVMDGFERFAQGHLITLFSATNYCGTANNAGAILVLGRDLVVVPKLIHPLPPAITSPETSPERHIEDTWMQELNVNRPPTPTRGRPQNPNDRGSLAWI

SEQ ID NO: 140 - DNA, 2652 bp, Oryza sativa
  CDS (1)..(2652)
atggggacggcggggaagggggcgtgggtggtgccggcgccggcgtacagggaggtggaagggtgggagggggcgggggacgactcgccggggttcaggtgcggccactcgctgacggtggtcgcgcccaccaaggggcacggcccgcggctcatcctcttcggcggcgccaccgccatcgaggccggcgcatcctcaggcatgccgggcatcaggctcgcgggggtgacgaactcggtgcactcgtatgatgtggacacgcgcaggtggacgagattgcatccagctggagagcctccatcgccgagggctgcacatgctgcagctgccgtaggaacgatggttgttttccagggtggtattggaccagcggggcactcgacagatgatctctatgttcttgacctgacaaacgacaagtttaaatggcacagggttgttgttcagggggctgggcctggtcctcgctatggtcactgtatggatctggtagcccaacgttatcttgtaactgtctctggaaatgatggaaagcgagtcttatcggatgcttgggctctggacacagcacagaaaccatataggtggcagaaacttaaccctgatggcgatagaccttcagcgagaatgtatgctactgccagtgcacgcaccgatggcatgcttttactttgcggtggaagggatgcttctgggatgccactttctgatgcttatggactactaatgcatacaagtggccagtgggagtggacactagctccaggggtatctccatctccaagatatcagcatgcagctgtctttgttggtgctcggttgcatgttactggtggagtccttagaggagggagagccattgagggagagggtgcaatagcagttctggacactgctgctggagtttggttggatagaaatggcattgtgacctctcgcacattgaagtcttcacatgaccatgatgcttcttcggatctacttcgccgttgtcgtcatgcagctgcttctgttggaacgcagatatacatttatggtggtctgaggggagatattctcctcgacgattttcttgttgctgataatgcacctatccaatcagaatttacttcatctatgtacgacagagtcccaagggcagaaaatcaaaatagaaaccacaattttaattcagattctcccactacaaataacagcacggacaagaagtccattgacatgttgacacaggcttcagctgccgaagctgaagctgttagtgctgtatggcgtgctgcacaggaagcatctcatgcatcttcagaagatagcctgtcagagggaataggatctgagtccccactcagtgaaacttcaccgatgcctgaggatttagacgatggaggctccctagaaccagatgtgaagctgcattcaagagcggttgtagtttctaaagaagcagtaggagatttgggatgtttggtccgacagctttcattggaccaatttgagaatgaaagcagaagaatgcatccctcaagcaatgatcaatcatatccagccaagaaagcattaaacagacaaaggtccccacaaggtttgcataagaaggttatttcgttcttacttaagccaaggaattggagggctcccgctgaaagggcttttttccttgattcatacgaagttggcgagctatgttatgctgctgagcagatttttatgcaggagccaactgttttacaattaaaagcaccaattaaagtatttggtgatcttcatgggcagtttggggacctaatgcgcctttttgatgaatatggttatccatcaactgctggtgatataacgtatattgattatctcttcttgggagactatgttgaccgaggtcagcacagcttggaaacaataacattgcttcttgctcttaaaatagagtaccctgaaaacgtccacttgattaggggaaatcacgaggctgctgacatcaatgcactttttgggttccgccttgaatgcatagagagaatgggtgaaagtgatggcatatgggcttggacaagattcaatcaactgtttaattatctcccacttgctgccatgatagaaaagaaaataatttgcatgcatggtggcattggaaggtcaataaacactatcgagcaaatcgagaaacttgaacggcctatcacaatggatgttggatctattattctcatggaccttttatggtccgatcctacagaaaatgatagtgtggagggtttgagaccaaatgcacgagggcctggcttggtgacatttgggcctgatcgagtgactgaattctgtaaacgaaacagattgcaactaatcataagagctcatgagtgtgttatggatgggtttgagcgttttgctcatgggcaattgataactttattttcagccactaactattgtggtactgcaaacaacgctggggccatacttgtggtgggcaggggactagttattgttccaaagttaattcatccacttcctccaccagttaattctccagagtcttccccagaacgtgccatggacgccacatggatgcaggaacttaacatacaacggccacctacaccaactagaggacggccacagtctgctagtgacagaaattctcttgcttatatatga

SEQ ID NO: 141 - protein, 883 aa, Oryza sativa
MGTAGKGAWVVPAPAYREVEGWEGAGDDSPGFRCGHSLTVVAPTKGHGPRLILFGGATAIEAGASSGMPGIRLAGVTNSVHSYDVDTRRWTRLHPAGEPPSPRAAHAAAAVGTMVVFQGGIGPAGHSTDDLYVLDLTNDKFKWHRVVVQGAGPGPRYGHCMDLVAQRYLVTVSGNDGKRVLSDAWALDTAQKPYRWQKLNPDGDRPSARMYATASARTDGMLLLCGGRDASGMPLSDAYGLLMHTSGQWEWTLAPGVSPSPRYQHAAVFVGARLHVTGGVLRGGRAIEGEGAIAVLDTAAGVWLDRNGIVTSRTLKSSHDHDASSDLLRRCRHAAASVGTQIYIYGGLRGDILLDDFLVADNAPIQSEFTSSMYDRVPRAENQNRNHNFNSDSPTTNNSTDKKSIDMLTQASAAEAEAVSAVWRAAQEASHASSEDSLSEGIGSESPLSETSPMPEDLDDGGSLEPDVKLHSRAVVVSKEAVGDLGCLVRQLSLDQFENESRRMHPSSNDQSYPAKKALNRQRSPQGLHKKVISFLLKPRNWRAPAERAFFLDSYEVGELCYAAEQIFMQEPTVLQLKAPIKVFGDLHGQFGDLMRLFDEYGYPSTAGDITYIDYLFLGDYVDRGQHSLETITLLLALKIEYPENVHLIRGNHEAADINALFGFRLECIERMGESDGIWAWTRFNQLFNYLPLAAMIEKKIICMHGGIGRSINTIEQIEKLERPITMDVGSIILMDLLWSDPTENDSVEGLRPNARGPGLVTFGPDRVTEFCKRNRLQLIIRAHECVMDGFERFAHGQLITLFSATNYCGTANNAGAILVVGRGLVIVPKLIHPLPPPVNSPESSPERAMDATWMQELNIQRPPTPTRGRPQSASDRNSLAYI

SEQ ID NO: 142 - DNA, 3267 bp, Arabidopsis thaliana
  CDS (1)..(3267)
atggatgaagattcgtctatggtggctgacaacgatcaggatcgtgagtttcagagccttgatggaggccaatctccttcgcctatggaaagagaaacgcctcagcagatgaacgaccaatcacctcctcctgaaggcggatcggtgcctacgccgccgccttcggatcctaatccggcaacttctcagcagcaagcggctgcggttgttggacaagagcagcagccggcgctagttgttggtccgaggtgtgcacctacgtattcggtggtggatgctatgatggataaaaaagaggatgggcctggccctaggtgtggtcacaccttgacggctgtgcctgctgttggtgatgaaggaacgcctggttatattggtcctcgtcttgtattgtttggtggtgcgacggctcttgagggaaattctggtggcaccggaactcctacttcagctggaagtgccggcattcttctgaaagcttcacatctgttaaatttaactggcaatctgaggtggcagtggctagctggggcaactgctgatgttcattgttatgatgtactttctaataagtggactaggcttacaccttttggagaaccaccaaccccgagggccgcacatgttgcaactgcagtcgggaccatggtagttattcagggtggaattggtcctgctggtttatcggctgaagaccttcatgttcttgatctcactcaacaacggccacgatggcacagggttgttgttcagggtcctggaccaggacctcgttatggacatgtcatggcactcgtggggcaaaggtatctcatggcaattggtggaaatgatgaaggggaaggtccacctccctgcatgtatgcaactgcaagtgcgcgctccgatggtcttcttctcctctgtggtggaagggatgcaaacagtgtgcctctggccagtgcatatggacttgcgaagcacagagatggacgttgggaatgggccatagcccctggtgtctcaccatcttccagatatcagcatgcagcagtctttgtaaatgcaagacttcatgtgtccggtggggcacttggtggtggacgcatggttgaagactcatccagtgttgcagtattggatactgcagcaggtgtatggtgtgatacaaaatcagttgttactagtcctagaactggtaggtatagtgccgatgcagctggtggcgatgcttcggttgagctgactaggcggtgtaggcatgctgctgctgcagtcggtgatttgatatttatctacggtggtttacgtggaggggtgttactcgatgacttattggttgctgaagatcttgctgctgcggaaacaacatatgctgcttctcatgctgctgcagctgcggcaacaaattctccaccaggtcgattacctggaaggtatggtttttcagatgaaaggaacagggagttatctgaatcagctgctgatggcgctgtggtgctgggaagccctgttgcaccccctgtaaatggtgatatgcatactgatattagccctgaaaatgcattacttccaggaactcgtgatgaatttagtgacaatgatccatcaccactttgtaggagaacgaataagggtgtggagtatcttgttgaagcatcagcagcggaagctgaggcgatcagtgcgacgttggctgctgccaaggcaagacaagtcaatggtgaagttgaactccctgatagggattgtggtgcagaggctacacccagtgggaaacctacattttcgctaatcaagccagattctatgggctcaatgagtgttacacctgcagggattcgtcttcatcatagagctgtgagtgtcacacttattgtattgaatatatcaagtcttgcattatactgctttgaacaccatgtggtggttgctgctgaaactggtggcgccttaggtggaatggttagacagttatccattgatcaatttgaaaatgagggacggcgtgtcagttatgggacaccagaaagtgcaacagcagcaaggaaactattagatcgacaaatgtcaatcaacagtgttccaaagaaggttatagctcatcttttgaagcctcgtggttggaagcctcctgttcgacggcagtttttcctagattgcaatgaaatagctgatctttgtgatagtgcagaacgtatcttcgcaagtgaaccgactgtattacagcttaaagctcctatcaaaatatttggtgatctgcatgggcagtttggggatcttatgcgcctttttgatgaatatggttcaccatctacagctggagacatatcatatatcgactacctcttcttaggggactatgttgatcggggtcaacacagtctagaaacaatctcccttctacttgcactaaaggtagtcctaagtgtattatgtcagttttgccttgatgcaggtgttctagttgcttttgaccatagaaggtttgacgttctatttttggtactgcaggttgagtaccagcataatgtacacttaattcggggaaaccatgaagctgcagatatcaatgccctttttggcttccggatagagtgtattgagcgaatgggtgaacgtgatggaatctgggtgtggcaccgaataaatcgtttattcaattggctacctcttgctgcatcgattgagaagaaaattatctgtatgcatgggggtattggtcgttctataaatcatgtggagcagatagaaaatattcaacgtccaattacaatggaagctggctccattgttcttatggatttattatggttagtccttagcttctatatgtcggatccaactgaaaatgacagtgtcgaaggtttaaggcccaatgctagaggccctggattggttacttttggggtaagtaattttcttcctgaccgtgtcatggagttctgcaacaacaacgatcttcagttgattgtacgagcacacgaatgcgtaatggatggatttgagcgttttgctcaggggcatttgataacgctcttttctgctacaaactattgtggtactgcaaacaatgctggggctatcttggtactagggagagatcttgtagtggtacctaagctcattcatccgttacctccagcactttcatcgcctgaaacttcaccagaaagacatatagaagacacatggatgcaggagctgaacgcaaataggccagcgacgccaacccgaggacgcccacaaaattcaaatgaccgaggaggttctctggcttggatgtga

SEQ ID NO: 143 - protein, 1088 aa, Arabidopsis thaliana
MDEDSSMVADNDQDREFQSLDGGQSPSPMERETPQQMNDQSPPPEGGSVPTPPPSDPNPATSQQQAAAVVGQEQQPALVVGPRCAPTYSVVDAMMDKKEDGPGPRCGHTLTAVPAVGDEGTPGYIGPRLVLFGGATALEGNSGGTGTPTSAGSAGILLKASHLLNLTGNLRWQWLAGATADVHCYDVLSNKWTRLTPFGEPPTPRAAHVATAVGTMVVIQGGIGPAGLSAEDLHVLDLTQQRPRWHRVVVQGPGPGPRYGHVMALVGQRYLMAIGGNDEGEGPPPCMYATASARSDGLLLLCGGRDANSVPLASAYGLAKHRDGRWEWAIAPGVSPSSRYQHAAVFVNARLHVSGGALGGGRMVEDSSSVAVLDTAAGVWCDTKSVVTSPRTGRYSADAAGGDASVELTRRCRHAAAAVGDLIFIYGGLRGGVLLDDLLVAEDLAAAETTYAASHAAAAAATNSPPGRLPGRYGFSDERNRELSESAADGAVVLGSPVAPPVNGDMHTDISPENALLPGTRDEFSDNDPSPLCRRTNKGVEYLVEASAAEAEAISATLAAAKARQVNGEVELPDRDCGAEATPSGKPTFSLIKPDSMGSMSVTPAGIRLHHRAVSVTLIVLNISSLALYCFEHHVVVAAETGGALGGMVRQLSIDQFENEGRRVSYGTPESATAARKLLDRQMSINSVPKKVIAHLLKPRGWKPPVRRQFFLDCNEIADLCDSAERIFASEPTVLQLKAPIKIFGDLHGQFGDLMRLFDEYGSPSTAGDISYIDYLFLGDYVDRGQHSLETISLLLALKVVLSVLCQFCLDAGVLVAFDHRRFDVLFLVLQVEYQHNVHLIRGNHEAADINALFGFRIECIERMGERDGIWVWHRINRLFNWLPLAASIEKKIICMHGGIGRSINHVEQIENIQRPITMEAGSIVLMDLLWLVLSFYMSDPTENDSVEGLRPNARGPGLVTFGVSNFLPDRVMEFCNNNDLQLIVRAHECVMDGFERFAQGHLITLFSATNYCGTANNAGAILVLGRDLVVVPKLIHPLPPALSSPETSPERHIEDTWMQELNANRPATPTRGRPQNSNDRGGSLAWM

SEQ ID NO: 144 - DNA, 2148 bp, Arabidopsis thaliana
  CDS (1)..(2148)
atggaggagaaagaagaagcgtctgagcaacaaaccggatccgaatccgaatcggcgtctttgactccttctcttcctcctccttcgcagcaacaacaacaacagcagcaacagccgcaggtaacggcggtggttggtccgagatgtgcgccaacgtattcggttgtgaatgctataatcgagaagaaagaagatggtcctggtcctagatgtggacatacgctgacggcggttcctgctgttggtgaagaagggacgtcttcttatattggcccgagactgatcttgtttggtggtgctactgctcttgagggtaattctggaggaacgggaacacctacttcaagtaatgtttcctatgcagggttagctggtgcaaccgctgatgttcattgttatgatgttctttctaataagtggtcgaggcttacaccttatggagaaccacctagtccaagagctgctcatgttgctactgctgttgggaccatggtagtaattcaggggggaataggtcctgctggtttatcagctgaggatcttcacgttcttgatctcacacagcaacggccacgatggcacagggttgttgttcagggtcctggaccaggaccacgttatggacatgtcatggcactggtaggacagaggtatctcatgcccctagcaagtgcatatggacttgccaagcacagagatggacgttgggaatgggccatagccccaggtgtctccccttctgccagataccagcatgctgcagtctttgtaaatgcaagactccatgtctctggtggggcacttggtggtggacgcatggtagaagactcgtccagtgttgcaggagttttacttgatgacctattggttgctgaagatcttgctgcagcggaaacaacatctgctgcctctcatgctgctgctgcagcagcagcaacaaacacgccacctggccgttcacctggaagatatggattttctgatgaaaggacaggggagctaccagaatcagctcctgacgctgtggtgctgggaagccctgttgcaccccctgctacgcccagtggaaaaccttcattatcattgattaagcctgattctgcagtaccaaatagtgttattcctgcaggggttcgacttcatcatagagctgtgactcatcttttgaagcctcgggggtggaagcctccagttcgtcgccagtttttcttggattgcaatgaaatagctgatctttgcgacagtgcagaacgtatcttctcaagcgaacctactgtgttacagcttaaagctcctattaagatatttggtgatttgcatggccagtttggggatctcatgcgcctttttgatgaatatggttcaccatcaacagctggagacatatcatacatcgattacctcttcttaggagactatgttgatcggggtcaacacagcctagagacaattacacttctgcttgctttaaaggttgaataccaacataacgtacacctgattcgtggaaatcatgaagctgccgacattaatgcactttttggtttccggatagagtgtattgagcgaatgggtgaacgtgatgggatctgggtgtggcatcgaataaaccgtttattcaattggctacctctggctgcactgattgagaagaaaatcatctgtatgcatgggggaattggtcggtcgataaatcatgtggagcagatagaaaatatccaacgtccaattacgatggaagcaggctcaattgtacttatggatttattatggtcggatccaactgaaaatgacagtgtcgaaggtttaaggcccaatgctagaggccctgggttggttacttttgggcctgaccgtgtcatggagttttgcaacaacaatgatctgcaattgattgtacgtgcgcatgaatgcgtgatggacggatttgagcgttttgcccaaggtcatttgataacgctcttttcggcaacaaattattgtggtaccgcaaacaatgccggggctatcttggtgttggggagagatcttgtggtggttcctaagcttatccatccattgcctccagcgataacctcacctgaaacttcaccagaaagacatatagaggatacatggatgcaggtttttatctcaaacagatactaa

SEQ ID NO: 145 - protein, 715 aa, Arabidopsis thaliana
MEEKEEASEQQTGSESESASLTPSLPPPSQQQQQQQQQPQVTAVVGPRCAPTYSVVNAIIEKKEDGPGPRCGHTLTAVPAVGEEGTSSYIGPRLILFGGATALEGNSGGTGTPTSSNVSYAGLAGATADVHCYDVLSNKWSRLTPYGEPPSPRAAHVATAVGTMVVIQGGIGPAGLSAEDLHVLDLTQQRPRWHRVVVQGPGPGPRYGHVMALVGQRYLMPLASAYGLAKHRDGRWEWAIAPGVSPSARYQHAAVFVNARLHVSGGALGGGRMVEDSSSVAGVLLDDLLVAEDLAAAETTSAASHAAAAAAATNTPPGRSPGRYGFSDERTGELPESAPDAVVLGSPVAPPATPSGKPSLSLIKPDSAVPNSVIPAGVRLHHRAVTHLLKPRGWKPPVRRQFFLDCNEIADLCDSAERIFSSEPTVLQLKAPIKIFGDLHGQFGDLMRLFDEYGSPSTAGDISYIDYLFLGDYVDRGQHSLETITLLLALKVEYQHNVHLIRGNHEAADINALFGFRIECIERMGERDGIWVWHRINRLFNWLPLAALIEKKIICMHGGIGRSINHVEQIENIQRPITMEAGSIVLMDLLWSDPTENDSVEGLRPNARGPGLVTFGPDRVMEFCNNNDLQLIVRAHECVMDGFERFAQGHLITLFSATNYCGTANNAGAILVLGRDLVVVPKLIHPLPPAITSPETSPERHIEDTWMQVFISNRY

SEQ ID NO: 146 - DNA, 2382 bp, Arabidopsis thaliana
  CDS (1)..(2382)
atggctcctgatcaatcttatcaatatccatctccttcgtatgaatcgatacagaccttttacgataccgatgaggattggccgggtcctagatgcggccatactctcacggcggttttcgtcaacaattcccatcagcttatcctcttcggcggcagtactactgccgtcgccaaccataactcctccttacccgagatcagtttagatggcgtcaccaattcggtccattcttttgatgttttgaccaggaagtggacaaggcttaatccgattggtgacgttccgtctcccagggcttgtcatgctgccgctttatatggcaccttgatccttattcagggtgggattggtccatccggaccttctgatggagatgtctacatgcttgacatgactaataacaagtggattaagtttctggttggaggggagactccaagccctcgctatggccatgttatggatatagctgctcagaggtggcttgtcatattcagcgggaataatggaaatgaaattctggatgatacatgggcattggacacgcgtggaccattttcatgggacagattgaacccgtctggcaatcagccaagtgggagaatgtatgcttcaggtagttctcgagaagatggtatttttttgctctgcggtggaatagatcactcaggagtgacactgggagatacttacgggctgaaaatggatagcgataatgtttggactcctgttccagctgtagctccttccccgagatatcaacatactgcggttttcggaggttcaaaactgcatgtcattgggggtatactgaatagggctcgcctaatcgatggtgaagcagttgttgctgtgcttgatactgagactggtgaatgggtagataccaatcaaccagagacctctgcgagcggcgccaatagacaaaatcaatatcaacttatgcgacgttgtcaccatgctgctgcatcgtttggcagccacctatatgtgcatggcgggattagagaagatgtattgctcgacgatttgctagttgctgaaacatcccagtcttcaagtcctgaaccagaagaagataatcctgataattatatgttgctcgacgactatctaatggatgaacctaagcctttaagttctgaaccagaagcttcatcctttataatgaggagcacaagtgaaattgcgatggatagattggcagaggcacataacttaccaactatcgaaaatgctttttatgatagtgctattgaaggatacgttccacttcaacatggagctgagacggttggaaatcgaggtggcttggtgagaactgcaagcttggatcaatctactcaagacttgcataagaaggtcatttcgacactgttgagacctaaaacctggacgcctcctgccaacagagattttttcttgagttatttagaagttaagcatttgtgcgatgaggtagagaaaatatttatgaatgaaccaacacttcttcagctcaaagttccaatcaaagtcttcggcgatatccatggacaatacggggatttgatgcgtttatttcatgaatatggacatccttcagtggaaggagatatcacccatatagactatttgtttttgggagattatgttgaccgtggacaacacagcttggagatcatcatgttgctgtttgctttgaagatagaatatccgaagaacatccacttgattcgtggaaatcatgagtctcttgcaatgaatagaatttatggttttcttacagaatgcgaagaaagaatgggcgagtcctatgggttcgaagcatggttaaagattaatcaagtttttgattatcttccgcttgctgcacttctagaaaagaaagttttgtgtgtccatggcggaattgggagggcagttacgatcgaagaaattgaaaatatcgaaaggccggcattcccggatactggatcaatggtcttgaaagacatcttatggtcagatcctacgatgaatgacactgttttgggtatagtagacaatgccagaggagaaggtgttgtctcatttgggcctgatatagtcaaggcatttctagaaaggaatggtctggagatgatactaagagcacacgagtgtgttattgacggctttgaaagattcgctgacggacggcttataacagtcttttctgctacaaattactgtggaactgcacaaaatgcgggagcaatattggtaattggtagagatatggtaatttatcctaagctgattcatcctcaccctcctcccatctcatcttcagaagaagactatacagacaaagcatggatgcaggagctgaacatcgagatgccgcctactccagctcgaggggagtcaagtgaataa

SEQ ID NO: 147 - protein, 793 aa, Arabidopsis thaliana
MAPDQSYQYPSPSYESIQTFYDTDEDWPGPRCGHTLTAVFVNNSHQLILFGGSTTAVANHNSSLPEISLDGVTNSVHSFDVLTRKWTRLNPIGDVPSPRACHAAALYGTLILIQGGIGPSGPSDGDVYMLDMTNNKWIKFLVGGETPSPRYGHVMDIAAQRWLVIFSGNNGNEILDDTWALDTRGPFSWDRLNPSGNQPSGRMYASGSSREDGIFLLCGGIDHSGVTLGDTYGLKMDSDNVWTPVPAVAPSPRYQHTAVFGGSKLHVIGGILNRARLIDGEAVVAVLDTETGEWVDTNQPETSASGANRQNQYQLMRRCHHAAASFGSHLYVHGGIREDVLLDDLLVAETSQSSSPEPEEDNPDNYMLLDDYLMDEPKPLSSEPEASSFIMRSTSEIAMDRLAEAHNLPTIENAFYDSAIEGYVPLQHGAETVGNRGGLVRTASLDQSTQDLHKKVISTLLRPKTWTPPANRDFFLSYLEVKHLCDEVEKIFMNEPTLLQLKVPIKVFGDIHGQYGDLMRLFHEYGHPSVEGDITHIDYLFLGDYVDRGQHSLEIIMLLFALKIEYPKNIHLIRGNHESLAMNRIYGFLTECEERMGESYGFEAWLKINQVFDYLPLAALLEKKVLCVHGGIGRAVTIEEIENIERPAFPDTGSMVLKDILWSDPTMNDTVLGIVDNARGEGVVSFGPDIVKAFLERNGLEMILRAHECVIDGFERFADGRLITVFSATNYCGTAQNAGAILVIGRDMVIYPKLIHPHPPPISSSEEDYTDKAWMQELNIEMPPTPARGESSE

SEQ ID NO: 148 - DNA, 2646 bp, Glycine max
  CDS (1)..(2646)
atggggtcgaaaccgtggctataccctgctccaacctatcgaactatagaaaccttctgggtcaccgatgaagacgcacccggccctcgctgtggccacaccctcaccgccgttgccgccaccaagactcaaggcccccgcttgatcctattcggcggcgcaaccgccattgaaggaggatcttcctctgcccccggcattcggttagcgggagtcactaataccgtccattcctatgacgttcaaagtagaaaatggactagtatcaaacccgccggagagccgccgtctcctcgggctgctcatgctgctgctgcagttggtaccatggttgtttttcagggtgggataggtccagcggggcattctaccgatgatctctatgtgcttgacttgaccaatgataaatacaaatggcatagggtcgttgtacaagggcaaggacccgggccacgctatggccatgtaatggacctggttgctcagagatatctagtaactgtcagcggaaatgacgggaaaagagttgtatctgatgcttgggcttttgatactgctcaaaaaccttatgtgtggcagaagctgaacccagaaggtgacagaccttctgcaagaatgtatgcaactgctagtgcccgctcagatggaatgtttttgctctgtggtggaagagactcttctggagctccactagcagatgcctatggactgctcatgcataggaatggccagtgggaatggacccttgcacctggagtttccccttcaccaaggtatcaacatgctgcggtttttgtcggtgcacgattacatgttacaggtggtgttctcaggggtggacggtccgtggaaggtgaagcatccattgcagtattggacactgctgctggggtttggttagatagaaacggcattgtgtcctcctcacgctcaaacaaaggtcatgattatgacccttctttggagcttatgcgtcgttgtcgtcatgcagctgcagctgttggtgttcatatatttatctatggtggtttaagaggagatatactactagatgatttcctagtggctgaaaattcgccattgcagcctgacattaattctcctgagagagcttcacctgttacaagctccaaacaaaatcaatctaacttaaattataatgtaacaacaccaaatttggatggtggaccagatattccttcatctggtcactcaggcatggacaaaaattccttggagaaactgagggaagcatcagctgctgaagctgaggcagcgagtgctgtctggcaagctgtgcaggctatatcaagtaatccagctgaagaaacatctctgtcagatgaaaactcacaagctgcagaaacagtttcagatggaagtgacacagagggagatgtccgccttcatcctagagccgttgtagttgccaaggaggctgtaggtaacctaggtggaatggtgagacaattatcgctagatcaatttgaaaatgaaagtagacgcatgattcccgtaaataatgatttgccatatcctacgaaaaagttcaccaggcagaaatctcctcagggtttacataaaaagataatttcaactttgcttaggcctcgcaactggaaagctcctgcaaacaggcggttcttcttggattcttatgaagtgggtgaactttgctatgctgctgagcaaatatttatgcatgaaccgaccgtacttcagctgaaagctcctgtcaaagtatttggtgatcttcatggtcagtttggtgatttgatgcggctatttgatgaatatggatttccttctactgcaggagacatcacctatattgactacctgtttttgggagattatgtcgatcgaggacagcacagcttggaaaccattaccttgctacttgctcttaagatcgaatatcccgagaatgttcacttgatacgtggaaaccacgaagctgctgacataaatgcactatttggttttcgtattgagtgcattgaaagaatgggtgaaaatgatgggatatgggcatggacacgattcaatcaactttttaactatcttccattagctgctcttattgaaaagaaaattatctgcatgcatggtggcattggaagatcgatcaattcagtagaacagatagagaagctcaaaaggcccataacaatggatgcaggatctattattttaatggaccttttatggtctgatcccacagagaatgatagtgtagagggtttgagaccaaatgctagaggcccagggcttgtcacttttgggcctgatcgtgtcacagaattttgtaagaaaaataaattgcagctcattataagggcccatgagtgtgtcatggatggctttgaacgatttgcccagggacaattaatcacccttttctctgcaactaactattgtggaactgcaaacaatgcgggagctatactggtagttggtaggggtttggttgtagttccaaaattaattcatcccataccacctccccttcagtctcctgagacatctcctgagcgtgttatggatgaaacatggatgcaggagcttaatattcagaggccaccaactcctactcggggtcgacctcagccggaccttgatcgtggctcactagcatatatatga

SEQ ID NO: 149 - protein, 881 aa, Glycine max
MGSKPWLYPAPTYRTIETFWVTDEDAPGPRCGHTLTAVAATKTQGPRLILFGGATAIEGGSSSAPGIRLAGVTNTVHSYDVQSRKWTSIKPAGEPPSPRAAHAAAAVGTMVVFQGGIGPAGHSTDDLYVLDLTNDKYKWHRVVVQGQGPGPRYGHVMDLVAQRYLVTVSGNDGKRVVSDAWAFDTAQKPYVWQKLNPEGDRPSARMYATASARSDGMFLLCGGRDSSGAPLADAYGLLMHRNGQWEWTLAPGVSPSPRYQHAAVFVGARLHVTGGVLRGGRSVEGEASIAVLDTAAGVWLDRNGIVSSSRSNKGHDYDPSLELMRRCRHAAAAVGVHIFIYGGLRGDILLDDFLVAENSPLQPDINSPERASPVTSSKQNQSNLNYNVTTPNLDGGPDIPSSGHSGMDKNSLEKLREASAAEAEAASAVWQAVQAISSNPAEETSLSDENSQAAETVSDGSDTEGDVRLHPRAVVVAKEAVGNLGGMVRQLSLDQFENESRRMIPVNNDLPYPTKKFTRQKSPQGLHKKIISTLLRPRNWKAPANRRFFLDSYEVGELCYAAEQIFMHEPTVLQLKAPVKVFGDLHGQFGDLMRLFDEYGFPSTAGDITYIDYLFLGDYVDRGQHSLETITLLLALKIEYPENVHLIRGNHEAADINALFGFRIECIERMGENDGIWAWTRFNQLFNYLPLAALIEKKIICMHGGIGRSINSVEQIEKLKRPITMDAGSIILMDLLWSDPTENDSVEGLRPNARGPGLVTFGPDRVTEFCKKNKLQLIIRAHECVMDGFERFAQGQLITLFSATNYCGTANNAGAILVVGRGLVVVPKLIHPIPPPLQSPETSPERVMDETWMQELNIQRPPTPTRGRPQPDLDRGSLAYI

SEQ ID NO: 150 - DNA, 29 bp, Artificial sequence
  primer
atagagctcaaccttttgggatgatgaag

SEQ ID NO: 151 - DNA, 30 bp, Artificial sequence
  primer
atacccgggatgccaccctgaaaaacgacc

SEQ ID NO: 152 - DNA, 29 bp, Artificial sequence
  primer
ataccatggaaccttttgggatgatgaag

SEQ ID NO: 153 - DNA, 32 bp, Artificial sequence
  primer
atattaattaaatgccaccctgaaaaacgacc

SEQ ID NO: 154 - DNA, 29 bp, Artificial sequence
  primer
ataggtaccaaccttttgggatgatgaag

SEQ ID NO: 155 - DNA, 30 bp, Artificial sequence
  primer
atagtcgacatgccaccctgaaaaacgacc

SEQ ID NO: 156 - DNA, 22 bp, Artificial sequence
  primer
atgggctcgaagccttggctac

SEQ ID NO: 157 - DNA, 20 bp, Artificial sequence
  primer
tcagatgtatgcaagcgagc

SEQ ID NO: 158 - protein, 1011 aa, Artificial sequence
  consensus sequence
  Variant (2)..(12): Xaa in position 2 to 12 is any amino acid
  Variant (14)..(14): Xaa in position 14 is any amino acid
  Variant (27)..(33): Xaa in position 27 to 33 is any amino acid
  Variant (34)..(41): Xaa in position 34 to 41 is any or no amino acid
  Variant (43)..(43): Xaa in position 43 is any amino acid
  Variant (48)..(48): Xaa in position 48 is any amino acid
  Variant (50)..(62): Xaa in position 50 to 62 is any amino acid
  Variant (63)..(87): Xaa in position 63 to 87 is any or no amino acid
  Variant (89)..(89): Xaa in position 89 is any amino acid
  Variant (91)..(91): Xaa in position 91 is any amino acid
  Variant (93)..(94): Xaa in position 93 to 94 is any amino acid
  Variant (97)..(98): Xaa in position 97 to 98 is any amino acid
  Variant (101)..(103): Xaa in position 101 to 103 is any amino acid
  Variant (106)..(106): Xaa in position 106 is any amino acid
  Variant (109)..(109): Xaa in position 109 is any amino acid
  Variant (111)..(111): Xaa in position 111 is any amino acid
  Variant (113)..(114): Xaa in position 113 to 114 is any amino acid
  Variant (116)..(116): Xaa in position 116 is any amino acid
  Variant (120)..(120): Xaa in position 120 is any amino acid
  Variant (122)..(122): Xaa in position 122 is any amino acid
  Variant (124)..(126): Xaa in position 124 to 126 is any amino acid
  Variant (129)..(132): Xaa in position 129 to 132 is any amino acid
  Variant (139)..(139): Xaa in position 139 is any amino acid
  Variant (141)..(141): Xaa in position 141 is any amino acid
  Variant (143)..(144): Xaa in position 143 to 144 is any amino acid
  Variant (146)..(148): Xaa in position 146 to 148 is any amino acid
  Variant (151)..(151): Xaa in position 151 is any amino acid
  Variant (153)..(155): Xaa in position 153 to 155 is any amino acid
  Variant (156)..(157): Xaa in position 156 to 157 is any or no amino acid
  Variant (159)..(162): Xaa in position 159 to 162 is any amino acid
  Variant (164)..(164): Xaa in position 164 is any amino acid
  Variant (166)..(167): Xaa in position 166 to 167 is any amino acid
  Variant (169)..(169): Xaa in position 169 is any amino acid
  Variant (177)..(180): Xaa in position 177 to 180 is any amino acid
  Variant (183)..(183): Xaa in position 183 is any amino acid
  Variant (185)..(185): Xaa in position 185 is any amino acid
  Variant (186)..(188): Xaa in position 186 to 188 is any or no amino acid
  Variant (191)..(192): Xaa in position 191 to 192 is any amino acid
  Variant (193)..(217): Xaa in position 193 to 217 is any or no amino acid
  Variant (219)..(220): Xaa in position 219 to 220 is any amino acid
  Variant (222)..(224): Xaa in position 222 to 224 is any amino acid
  Variant (228)..(229): Xaa in position 228 to 229 is any amino acid
  Variant (231)..(231): Xaa in position 231 is any amino acid
  Variant (233)..(233): Xaa in position 233 is any amino acid
  Variant (236)..(237): Xaa in position 236 to 237 is any amino acid
  Variant (243)..(243): Xaa in position 243 is any amino acid
  Variant (245)..(245): Xaa in position 245 is any amino acid
  Variant (246)..(249): Xaa in position 246 to 249 is any or no amino acid
  Variant (251)..(253): Xaa in position 251 to 253 is any amino acid
  Variant (257)..(263): Xaa in position 257 to 263 is any amino acid
  Variant (264)..(265): Xaa in position 264 to 265 is any or no amino acid
  Variant (267)..(269): Xaa in position 267 to 269 is any amino acid
  Variant (271)..(271): Xaa in position 271 is any amino acid
  Variant (273)..(273): Xaa in position 273 is any amino acid
  Variant (276)..(276): Xaa in position 276 is any amino acid
  Variant (281)..(281): Xaa in position 281 is any amino acid
  Variant (285)..(288): Xaa in position 285 to 288 is any amino acid
  Variant (292)..(292): Xaa in position 292 is any amino acid
  Variant (295)..(295): Xaa in position 295 is any amino acid
  Variant (297)..(299): Xaa in position 297 to 299 is any amino acid
  Variant (301)..(308): Xaa in position 301 to 308 is any amino acid
  Variant (314)..(315): Xaa in position 314 to 315 is any amino acid
  Variant (317)..(317): Xaa in position 317 is any amino acid
  Variant (319)..(319): Xaa in position 319 is any amino acid
  Variant (321)..(326): Xaa in position 321 to 326 is any amino acid
  Variant (328)..(338): Xaa in position 328 to 338 is any amino acid
  Variant (339)..(345): Xaa in position 339 to 345 is any or no amino acid
  Variant (347)..(347): Xaa in position 347 is any amino acid
  Variant (351)..(351): Xaa in position 351 is any amino acid
  Variant (353)..(353): Xaa in position 353 is any amino acid
  Variant (356)..(357): Xaa in position 356 to 357 is any amino acid
  Variant (359)..(364): Xaa in position 359 to 364 is any amino acid
  Variant (367)..(367): Xaa in position 367 is any amino acid
  Variant (369)..(370): Xaa in position 369 to 370 is any amino acid
  Variant (371)..(371): Xaa in position 371 is any or no amino acid
  Variant (376)..(376): Xaa in position 376 is any amino acid
  Variant (381)..(413): Xaa in position 381 to 413 is any amino acid
  Variant (414)..(487): Xaa in position 414 to 487 is any or no amino acid
  Variant (489)..(489): Xaa in position 489 is any amino acid
  Variant (491)..(492): Xaa in position 491 to 492 is any amino acid
  Variant (494)..(521): Xaa in position 494 to 521 is any amino acid
  Variant (522)..(546): Xaa in position 522 to 546 is any or no amino acid
  Variant (548)..(550): Xaa in position 548 to 550 is any amino acid
  Variant (552)..(553): Xaa in position 552 to 553 is any amino acid
  Variant (554)..(580): Xaa in position 554 to 580 is any or no amino acid
  Variant (582)..(583): Xaa in position 582 to 583 is any amino acid
  Variant (585)..(586): Xaa in position 585 to 586 is any amino acid
  Variant (589)..(590): Xaa in position 589 to 590 is any amino acid
  Variant (592)..(592): Xaa in position 592 is any amino acid
  Variant (595)..(620): Xaa in position 595 to 620 is any amino acid
  Variant (621)..(621): Xaa in position 621 is any or no amino acid
  Variant (623)..(627): Xaa in position 623 to 627 is any amino acid
  Variant (630)..(630): Xaa in position 630 is any amino acid
  Variant (631)..(633): Xaa in position 631 to 633 is any or no amino acid
  Variant (636)..(636): Xaa in position 636 is any amino acid
  Variant (638)..(639): Xaa in position 638 to 639 is any amino acid
  Variant (641)..(642): Xaa in position 641 to 642 is any amino acid
  Variant (644)..(645): Xaa in position 644 to 645 is any amino acid
  Variant (647)..(647): Xaa in position 647 is any amino acid
  Variant (651)..(653): Xaa in position 651 to 653 is any amino acid
  Variant (655)..(657): Xaa in position 655 to 657 is any amino acid
  Variant (660)..(662): Xaa in position 660 to 662 is any amino acid
  Variant (664)..(664): Xaa in position 664 is any amino acid
  Variant (667)..(668): Xaa in position 667 to 668 is any amino acid
  Variant (672)..(672): Xaa in position 672 is any amino acid
  Variant (677)..(677): Xaa in position 677 is any amino acid
  Variant (681)..(681): Xaa in position 681 is any amino acid
  Variant (685)..(685): Xaa in position 685 is any amino acid
  Variant (689)..(689): Xaa in position 689 is any amino acid
  Variant (697)..(697): Xaa in position 697 is any amino acid
  Variant (701)..(701): Xaa in position 701 is any amino acid
  Variant (704)..(705): Xaa in position 704 to 705 is any amino acid
  Variant (709)..(710): Xaa in position 709 to 710 is any amino acid
  Variant (729)..(729): Xaa in position 729 is any amino acid
  Variant (731)..(731): Xaa in position 731 is any amino acid
  Variant (734)..(734): Xaa in position 734 is any amino acid
  Variant (738)..(738): Xaa in position 738 is any amino acid
  Variant (739)..(770): Xaa in position 739 to 770 is any or no amino acid
  Variant (773)..(774): Xaa in position 773 to 774 is any amino acid
  Variant (776)..(776): Xaa in position 776 is any amino acid
  Variant (785)..(788): Xaa in position 785 to 788 is any amino acid
  Variant (790)..(792): Xaa in position 790 to 792 is any amino acid
  Variant (795)..(796): Xaa in position 795 to 796 is any amino acid
  Variant (799)..(799): Xaa in position 799 is any amino acid
  Variant (805)..(806): Xaa in position 805 to 806 is any amino acid
  Variant (808)..(810): Xaa in position 808 to 810 is any amino acid
  Variant (812)..(814): Xaa in position 812 to 814 is any amino acid
  Variant (816)..(817): Xaa in position 816 to 817 is any amino acid
  Variant (819)..(820): Xaa in position 819 to 820 is any amino acid
  Variant (826)..(827): Xaa in position 826 to 827 is any amino acid
  Variant (831)..(832): Xaa in position 831 to 832 is any amino acid
  Variant (834)..(834): Xaa in position 834 is any amino acid
  Variant (841)..(844): Xaa in position 841 to 844 is any amino acid
  Variant (845)..(845): Xaa in position 845 is any or no amino acid
  Variant (847)..(847): Xaa in position 847 is any amino acid
  Variant (850)..(852): Xaa in position 850 to 852 is any amino acid
  Variant (855)..(859): Xaa in position 855 to 859 is any amino acid
  Variant (862)..(863): Xaa in position 862 to 863 is any amino acid
  Variant (865)..(865): Xaa in position 865 is any amino acid
  Variant (867)..(867): Xaa in position 867 is any amino acid
  Variant (870)..(876): Xaa in position 870 to 876 is any amino acid
  Variant (881)..(881): Xaa in position 881 is any amino acid
  Variant (884)..(884): Xaa in position 884 is any amino acid
  Variant (886)..(886): Xaa in position 886 is any amino acid
  Variant (888)..(890): Xaa in position 888 to 890 is any amino acid
  Variant (895)..(895): Xaa in position 895 is any amino acid
  Variant (897)..(897): Xaa in position 897 is any amino acid
  Variant (899)..(899): Xaa in position 899 is any amino acid
  Variant (902)..(906): Xaa in position 902 to 906 is any amino acid
  Variant (909)..(909): Xaa in position 909 is any amino acid
  Variant (911)..(912): Xaa in position 911 to 912 is any amino acid
  Variant (914)..(916): Xaa in position 914 to 916 is any amino acid
  Variant (918)..(918): Xaa in position 918 is any amino acid
  Variant (920)..(921): Xaa in position 920 to 921 is any amino acid
  Variant (923)..(923): Xaa in position 923 is any amino acid
  Variant (930)..(930): Xaa in position 930 is any amino acid
  Variant (938)..(938): Xaa in position 938 is any amino acid
  Variant (940)..(940): Xaa in position 940 is any amino acid
  Variant (944)..(944): Xaa in position 944 is any amino acid
  Variant (955)..(955): Xaa in position 955 is any amino acid
  Variant (963)..(963): Xaa in position 963 is any amino acid
  Variant (966)..(967): Xaa in position 966 to 967 is any amino acid
  Variant (969)..(970): Xaa in position 969 to 970 is any amino acid
  Variant (977)..(977): Xaa in position 977 is any amino acid
  Variant (980)..(982): Xaa in position 980 to 982 is any amino acid
  Variant (984)..(984): Xaa in position 984 is any amino acid
  Variant (986)..(988): Xaa in position 986 to 988 is any amino acid
  Variant (990)..(995): Xaa in position 990 to 995 is any amino acid
  Variant (1002)..(1004): Xaa in position 1002 to 1004 is any amino acid
  Variant (1006)..(1006): Xaa in position 1006 is any amino acid
  Variant (1009)..(1009): Xaa in position 1009 is any amino acid
YXXXXXXXXXXXDXPGPRCGHTLTAVXXXXXXXXXXXXXXXLXLFGGXTXXXXXXXXXXXXXXXXXXXXXXXXXXXXXXXXXXXXXXLXGXTXXVHXXDVXXXKWXRLXPXGXXPXPRAXHXAXXXGTXXXXQGGIGPXGXSXXDXXXLDXTXXXXXWXXXXVXGXXPXPRYGHVMXXXXQRXLXXXXGNXXXXXXXXXXXXXXXXXXXXXXXXXXXGXXPXXXMYAXXSXRXDGXXLLCGGXDXXXXXLXXXYGLXXXXXXXXXWXXXPXVXPSXRYQHXAVFXXXXLHVXGGXLXXXRXXXXXXXXAVLDTXXGXWXDXXXXXXSXXXXXXXXXXXXXXXXXXLXRRCXHXAAXXGXXXXXXGGXRXXXLLDDXLVAEXXXXXXXXXXXXXXXXXXXXXXXXXXXXXXXXXXXXXXXXXXXXXXXXXXXXXXXXXXXXXXXXXXXXXXXXXXXXXXXXXXXXXXXXXXXXXXXXXXXXXXXXXXXEXEXXSXXXXXXXXXXXXXXXXXXXXXXXXXXXXXXXXXXXXXXXXXXXXXXXXXXXXXLXXXAXXXXXXXXXXXXXXXXXXXXXXXXXXXXXGXXGXXVRXXSXDQXXXXXXXXXXXXXXXXXXXXXXXXXXXSXXXXXKKXXXXLLXPXXWXXPXXRXFFLXXXEXXXLCXXXEXIFXXEPTXLQLKXPIKXFGDXHGQXGDLMRLFXEYGXPSXXGDIXXIDYLFLGDYVDRGQHSLEXIXLLXALKXXXXXXXXXXXXXXXXXXXXXXXXXXXXXXXXXEYXXNXHLIRGNHEXXXXNXXXGFXXECXERMGEXXGXXXWXXXNXXFXXLPLAAXXEKKXXCXHGGIGRXXXXXEXIEXXXRPXXXXXGSXXLXDXLWXXXXXXXSDPTXNDXVXGXXXNARGXGXVXFGXXXXXPDXVXXFXXXNXLXXIXRAHECVXDGFERFAXGXLITXFSATNYCGTAXNAGAILVXGRXXVXXPKLIHPXPPXXXSXEXXXEXXXXXXWMQELNXXXPXTPXRG

SEQ ID NO: 159 - protein, 59 aa, Artificial sequence
  protein pattern
  Variant (2)..(2): Xaa in position 2 is any or no amino acid
  Variant (6)..(6): Xaa in position 6 is Ala or Val
  Variant (10)..(10): Xaa in position 10 is Ile or Val
  Variant (14)..(14): Xaa in position 14 is Ile or Leu
  Variant (18)..(18): Xaa in position 18 is Phe or Tyr
  Variant (26)..(26): Xaa in position 26 is Asp or His
  Variant (30)..(30): Xaa in position 30 is any amino acid
  Variant (33)..(33): Xaa in position 33 is Thr or Val
  Variant (34)..(34): Xaa in position 34 is Ala or Glu
  Variant (38)..(38): Xaa in position 38 is Ser or Thr
  Variant (39)..(39): Xaa in position 39 is His or Tyr
  Variant (58)..(58): Xaa in position 58 is any amino acid
LXQLKXPIKXFGDXHGQXGDLMRLFXEYGXPSXXGDIXXIDYLFLGDYVDRGQHSLEXI

SEQ ID NO: 160 - protein, 58 aa, Artificial sequence
  protein pattern
  Variant (2)..(2): Xaa in position 2 is any amino acid
  Variant (5)..(5): Xaa in position 5 is any amino acid
  Variant (7)..(7): Xaa in position 7 is any amino acid
  Variant (8)..(8): Xaa in position 8 is Ala or Glu
  Variant (10)..(11): Xaa in position 10 to 11 is any amino acid
  Variant (12)..(12): Xaa in position 12 is Asn or Arg
  Variant (14)..(14): Xaa in position 14 is any amino acid
  Variant (16)..(16): Xaa in position 16 is Glu or Gln
  Variant (17)..(17): Xaa in position 17 is Leu or Met
  Variant (19)..(19): Xaa in position 19 is Ile, Leu or Val
  Variant (26)..(26): Xaa in position 26 is Ile or Met
  Variant (34)..(34): Xaa in position 34 is any amino acid
  Variant (36)..(36): Xaa in position 36 is any amino acid
  Variant (40)..(40): Xaa in position 40 is Leu or Val
  Variant (51)..(51): Xaa in position 51 is Asn or Gln
FXPDXVXXFXXXNXLXXIXRAHECVXDGFERFAXGXLITXFSATNYCGTAXNAGAILV

SEQ ID NO: 161 - protein, 51 aa, Artificial sequence
  protein pattern
  Variant (2)..(2): Xaa in position 2 is any or no amino acid
  Variant (4)..(4): Xaa in position 4 is any amino acid
  Variant (5)..(5): Xaa in position 5 is Asn or Gln
  Variant (6)..(6): Xaa in position 6 is Asp, Gly or Ser
  Variant (7)..(7): Xaa in position 7 is Leu or Val
  Variant (8)..(8): Xaa in position 8 is any amino acid
  Variant (11)..(12): Xaa in position 11 to 12 is Ile or Val
  Variant (13)..(13): Xaa in position 13 is Ala or Ser
  Variant (14)..(14): Xaa in position 14 is any amino acid
  Variant (17)..(17): Xaa in position 17 is Lys or Arg
  Variant (19)..(19): Xaa in position 19 is Lys or Arg
  Variant (20)..(20): Xaa in position 20 is Gly, Asn or Thr
  Variant (22)..(22): Xaa in position 22 is any amino acid
  Variant (23)..(23): Xaa in position 23 is any or no amino acid
  Variant (25)..(25): Xaa in position 25 is Ala, Gly, Pro or Val
  Variant (26)..(26): Xaa in position 26 is any amino acid
  Variant (28)..(28): Xaa in position 28 is any amino acid
  Variant (32)..(32): Xaa in position 32 is Asp or Ser
  Variant (33)..(34): Xaa in position 33 to 34 is any amino acid
  Variant (36)..(36): Xaa in position 36 is Ile or Val
  Variant (37)..(37): Xaa in position 37 is any amino acid
  Variant (38)..(38): Xaa in position 38 is Asp, Glu or His
  Variant (41)..(41): Xaa in position 41 is any amino acid
  Variant (42)..(42): Xaa in position 42 is Ala, Glu or Ser
  Variant (43)..(43): Xaa in position 43 is Ala or Val
  Variant (45)..(45): Xaa in position 45 is any amino acid
  Variant (48)..(49): Xaa in position 48 to 49 is any amino acid
  Variant (51)..(51): Xaa in position 51 is Pro or Gln
QXSXXXXXKKXXXXLLXPXXWXXPXXRXFFLXXXEXXXLCXXXEXIFXXEX

SEQ ID NO: 162 - protein, 31 aa, Artificial sequence
  protein pattern
  Variant (3)..(3): Xaa in position 3 is any amino acid
  Variant (4)..(4): Xaa in position 4 is Ile or Leu
  Variant (5)..(5): Xaa in position 5 is any amino acid
  Variant (8)..(8): Xaa in position 8 is Ala or Ile
  Variant (9)..(10): Xaa in position 9 to 10 is any amino acid
  Variant (11)..(11): Xaa in position 11 is Asp or Glu
  Variant (12)..(12): Xaa in position 12 is Ala, Thr or Val
  Variant (15)..(15): Xaa in position 15 is Ile, Leu or Met
  Variant (16)..(16): Xaa in position 16 is Ile or Val
  Variant (18)..(20): Xaa in position 18 to 20 is any or no amino acid
  Variant (27)..(27): Xaa in position 27 is any amino acid
  Variant (30)..(30): Xaa in position 30 is Ser or Thr
  Variant (31)..(31): Xaa in position 31 is Ile or Val
IEXXXRPXXXXXGSXXLXXXLWSDPTXNDXX

SEQ ID NO: 163 - protein, 29 aa, Artificial sequence
  protein pattern
  Variant (2)..(4): Xaa in position 2 to 4 is any amino acid
  Variant (5)..(5): Xaa in position 5 is any or no amino acid
  Variant (7)..(7): Xaa in position 7 is any amino acid
  Variant (8)..(8): Xaa in position 8 is any or no amino acid
  Variant (10)..(10): Xaa in position 10 is Asp, Glu, Pro or Gln
  Variant (11)..(11): Xaa in position 11 is Gly or Thr
  Variant (13)..(13): Xaa in position 13 is Gly or Ser
  Variant (21)..(21): Xaa in position 21 is Ala or Asp
  Variant (22)..(22): Xaa in position 22 is Ile or Leu
  Variant (23)..(23): Xaa in position 23 is Ala or Val
  Variant (24)..(24): Xaa in position 24 is Ala, Gly or Ser
  Variant (27)..(27): Xaa in position 27 is Trp or Tyr
  Variant (29)..(29): Xaa in position 29 is Met or Val
WXXXXVXXGXXPXPRYGHVMXXXXQRXLX

SEQ ID NO: 164 - protein, 21 aa, Artificial sequence
  protein pattern
  Variant (2)..(2): Xaa in position 2 is Asp or Gly
  Variant (3)..(3): Xaa in position 3 is Leu or Met
  Variant (5)..(5): Xaa in position 5 is Ile or Val
  Variant (6)..(6): Xaa in position 6 is any amino acid
  Variant (13)..(13): Xaa in position 13 is any amino acid
  Variant (16)..(16): Xaa in position 16 is Ala or Pro
  Variant (17)..(17): Xaa in position 17 is Ile or Leu
  Variant (18)..(18): Xaa in position 18 is any amino acid
  Variant (20)..(20): Xaa in position 20 is Pro or Ser
RXXVXXPKLIHPXPPXXXSXE

SEQ ID NO: 165 - protein, 38 aa, Artificial sequence
  protein pattern
  Variant (2)..(2): Xaa in position 2 is any amino acid
  Variant (3)..(4): Xaa in position 3 to 4 is any or no amino acid
  Variant (8)..(8): Xaa in position 8 is His or Arg
  Variant (10)..(10): Xaa in position 10 is Ala or Gly
  Variant (13)..(13): Xaa in position 13 is Ala or Ser
  Variant (14)..(14): Xaa in position 14 is Phe or Val
  Variant (16)..(17): Xaa in position 16 to 17 is any amino acid
  Variant (18)..(18): Xaa in position 18 is Ile or Leu
  Variant (19)..(19): Xaa in position 19 is Phe or Tyr
  Variant (20)..(20): Xaa in position 20 is Ile or Val
  Variant (21)..(21): Xaa in position 21 is His or Tyr
  Variant (24)..(24): Xaa in position 24 is Ile or Leu
  Variant (26)..(26): Xaa in position 26 is Glu or Gly
  Variant (27)..(27): Xaa in position 27 is Asp or Gly
  Variant (28)..(28): Xaa in position 28 is Ile or Val
  Variant (33)..(33): Xaa in position 33 is Phe or Leu
  Variant (37)..(37): Xaa in position 37 is Asp or Glu
  Variant (38)..(38): Xaa in position 38 is Asp, Asn or Thr
LXXXRRCXHXAAXXGXXXXXXGGXRXXXLLDDXLVAXX

SEQ ID NO: 166 - protein, 21 aa, Artificial sequence
  protein pattern
  Variant (2)..(2): Xaa in position 2 is any amino acid
  Variant (8)..(8): Xaa in position 8 is Ala or Gly
  Variant (15)..(15): Xaa in position 15 is any amino acid
  Variant (16)..(16): Xaa in position 16 is Ala or Val
  Variant (17)..(17): Xaa in position 17 is Asn, Thr or Val
  Variant (18)..(18): Xaa in position 18 is any amino acid
  Variant (19)..(19): Xaa in position 19 is Asp, Glu, Ser or Thr
  Variant (20)..(20): Xaa in position 20 is any amino acid
  Variant (21)..(21): Xaa in position 21 is Gly or Gln
DXPGPRCXHTLTAVXXXXXXX

SEQ ID NO: 167 - protein, 33 aa, Artificial sequence
  protein pattern
  Variant (2)..(3): Xaa in position 2 to 3 is any amino acid
  Variant (5)..(5): Xaa in position 5 is Pro or Ser
  Variant (6)..(6): Xaa in position 6 is Ala, Gly or Pro
  Variant (7)..(7): Xaa in position 7 is any amino acid
  Variant (11)..(11): Xaa in position 11 is Ser or Thr
  Variant (12)..(12): Xaa in position 12 is Ala or Gly
  Variant (14)..(14): Xaa in position 14 is Ala or Ser
  Variant (16)..(16): Xaa in position 16 is Glu, Ser or Thr
  Variant (19)..(19): Xaa in position 19 is Ile, Leu or Met
  Variant (20)..(20): Xaa in position 20 is Phe or Leu
  Variant (26)..(26): Xaa in position 26 is any amino acid
  Variant (28)..(29): Xaa in position 28 to 29 is any amino acid
  Variant (30)..(30): Xaa in position 30 is Gly or Ser
  Variant (31)..(31): Xaa in position 31 is any amino acid
  Variant (32)..(32): Xaa in position 32 is Pro or Thr
GXXPXXXMYAXXSXRXDGXXLLCGGXDXXXXXL

SEQ ID NO: 168 - protein, 19 aa, Artificial sequence
  protein pattern
  Variant (7)..(7): Xaa in position 7 is Ala, Ile or Val
  Variant (8)..(8): Xaa in position 8 is Glu, Asn or Gln
  Variant (9)..(9): Xaa in position 9 is any amino acid
  Variant (11)..(12): Xaa in position 11 to 12 is any or no amino acid
  Variant (15)..(15): Xaa in position 15 is any amino acid
  Variant (16)..(16): Xaa in position 16 is Ala, Gly or Thr
  Variant (18)..(18): Xaa in position 18 is Gly or Pro
  Variant (19)..(19): Xaa in position 19 is Glu, Gln or Arg
WMQELNXXXPXXPTXXRXX

SEQ ID NO: 169 - protein, 20 aa, Artificial sequence
  protein pattern
  Variant (5)..(5): Xaa in position 5 is Ala or Glu
  Variant (6)..(6): Xaa in position 6 is Ala or Thr
  Variant (8)..(9): Xaa in position 8 to 9 is any or no amino acid
  Variant (11)..(12): Xaa in position 11 to 12 is any or no amino acid
  Variant (14)..(15): Xaa in position 14 to 15 is any amino acid
  Variant (16)..(16): Xaa in position 16 is Gly, Gln or Ser
  Variant (17)..(18): Xaa in position 17 to 18 is any amino acid
  Variant (19)..(19): Xaa in position 19 is Ser or Thr
VLDTXXGXXVXXDXXXXXXS

SEQ ID NO: 170 - protein, 15 aa, Artificial sequence
  protein pattern
  Variant (2)..(4): Xaa in position 2 to 4 is any amino acid
  Variant (5)..(5): Xaa in position 5 is any or no amino acid
  Variant (7)..(7): Xaa in position 7 is Gly or Ser
  Variant (8)..(8): Xaa in position 8 is Cys, Gly or Ser
  Variant (9)..(9): Xaa in position 9 is any amino acid
  Variant (10)..(10): Xaa in position 10 is Pro or Val
  Variant (11)..(11): Xaa in position 11 is Glu or Arg
  Variant (12)..(12): Xaa in position 12 is Ala or Gln
  Variant (13)..(13): Xaa in position 13 is any amino acid
  Variant (15)..(15): Xaa in position 15 is Phe, Ile or Leu
EXXXXLXXXXXXXSX

SEQ ID NO: 171 - DNA, 1854 bp, Arabidopsis thaliana
  CDS (1)..(1854)
atggctctgcttattatcactgccttagtttttagtagtttatggtcatctgtgtcaccagatgctcaaggggatgcattatttgcgttgaggagctcgttacgtgcatctcctgaacagcttagtgattggaaccagaatcaagtcgatccttgtacttggtctcaagttatttgtgatgacaagaaacatgttacttctgtaaccttgtcttacatgaacttctcctcgggaacactgtcttcaggaataggaatcttgacaactctcaagactcttacattgaagggaaatggaataatgggtggaataccagaatccattggaaatctgtctagcttgaccagcttagatttggaggataatcacttaactgatcgcattccatccactctcggtaatctcaagaatctacagttcttgaccttgagtaggaataaccttaatggttctatcccggattcacttacaggtctatcaaaactgataaatattctgctcgactcaaataatctcagtggtgagattcctcagagtttattcaaaatcccaaaatacaatttcacagcaaacaacttgagctgtggtggcactttcccgcaaccttgtgtaaccgagtccagtccttcaggtgattcaagcagtagaaaaactggaatcatcgctggagttgttagcggaatagcggttattctactaggattcttcttctttttcttctgcaaggataaacataaaggatataaacgagacgtatttgtggatgttgcaggaacgaactttaaaaaaggtttgatttcaggtgaagtggacagaaggattgcttttggacagttgagaagatttgcatggagagagcttcagttggctacagatgagttcagtgaaaagaatgttctcggacaaggaggctttgggaaagtttacaaaggattgctttcggatggcaccaaagtcgctgtaaaaagattgactgattttgaacgtccaggaggagatgaagctttccagagagaagttgagatgataagtgtagctgttcataggaatctgcttcgccttatcggcttttgtacaacacaaactgaacgacttttggtgtatcctttcatgcagaatctaagtgttgcatattgcttaagagagattaaacccggggatccagttctggattggttcaggaggaaacagattgcgttaggtgcagcacgaggactcgaatatcttcatgaacattgcaacccgaagatcatacacagagatgtgaaagctgcaaatgtgttactagatgaagactttgaagcagtggttggtgattttggtttagccaagttggtagatgttagaaggactaatgtaaccactcaggtccgaggaacaatgggtcatattgcaccagaatgtatatccacagggaaatcgtcagagaaaaccgatgttttcgggtacggaattatgcttctggagcttgtaactggacaaagagcaattgatttctcgcggttagaggaagaagatgatgtcttattgctagaccatgtgaagaaactggaaagagagaagagattagaagacatagtagataagaagcttgatgaggattatataaaggaagaagttgaaatgatgatacaagtagctctgctatgcacacaagcagcaccggaagaacgaccagcgatgtcggaagtagtaagaatgctagaaggagaagggcttgcagagagatgggaagagtggcagaatcttgaagtgacgagacaagaagagtttcagaggttgcagaggagatttgattggggtgaagattccattaataatcaagatgctattgaattatctggtggaagatag

SEQ ID NO: 172 - protein, 617 aa, Arabidopsis thaliana
MALLIITALVFSSLWSSVSPDAQGDALFALRSSLRASPEQLSDWNQNQVDPCTWSQVICDDKKHVTSVTLSYMNFSSGTLSSGIGILTTLKTLTLKGNGIMGGIPESIGNLSSLTSLDLEDNHLTDRIPSTLGNLKNLQFLTLSRNNLNGSIPDSLTGLSKLINILLDSNNLSGEIPQSLFKIPKYNFTANNLSCGGTFPQPCVTESSPSGDSSSRKTGIIAGVVSGIAVILLGFFFFFFCKDKHKGYKRDVFVDVAGTNFKKGLISGEVDRRIAFGQLRRFAWRELQLATDEFSEKNVLGQGGFGKVYKGLLSDGTKVAVKRLTDFERPGGDEAFQREVEMISVAVHRNLLRLIGFCTTQTERLLVYPFMQNLSVAYCLREIKPGDPVLDWFRRKQIALGAARGLEYLHEHCNPKIIHRDVKAANVLLDEDFEAVVGDFGLAKLVDVRRTNVTTQVRGTMGHIAPECISTGKSSEKTDVFGYGIMLLELVTGQRAIDFSRLEEEDDVLLLDHVKKLEREKRLEDIVDKKLDEDYIKEEVEMMIQVALLCTQAAPEERPAMSEVVRMLEGEGLAERWEEWQNLEVTRQEEFQRLQRRFDWGEDSINNQDAIELSGGR

SEQ ID NO: 173 - DNA, 1887 bp, Arabidopsis thaliana
  CDS (1)..(1887)
atggggagaaaaaagtttgaagcttttggttttgtctgcttaatctcactgcttcttctgtttaattcgttatggcttgcctcttctaacatggaaggtgatgcactgcacagtttgagagctaatctagttgatccaaataatgtcttgcaaagctgggatcctacgcttgttaatccgtgtacttggtttcacgtaacgtgtaacaacgagaacagtgttataagagtcgatcttgggaatgcagacttgtctggtcagttggttcctcagctaggtcagctcaagaacttgcagtacttggagctttatagtaataacataaccgggccggttccaagcgatcttgggaatctgacaaacttagtgagcttggatctttacttgaacagcttcactggtccaattccagattctctaggaaagctattcaagcttcgctttcttcggctcaacaataacagtctcaccggaccaattcccatgtcattgactaatatcatgacccttcaagttttggatctgtcgaacaaccgattatccggatctgttcctgataatggttccttctcgctcttcactcccatcagttttgctaacaacttggatctatgcggcccagttactagccgtccttgtcctggatctcccccgttttctcctccaccaccttttataccacctcccatagttcctacaccaggtgggtatagtgctactggagccattgcgggaggagttgctgctggtgctgctttactatttgctgcccctgctttagcttttgcttggtggcgtagaagaaaacctcaagaattcttctttgatgttcctgccgaagaggaccctgaggttcacttggggcagcttaagcggttctctctacgggaacttcaagtagcaactgatagcttcagcaacaagaacattttgggccgaggtgggttcggaaaagtctacaaaggccgtcttgctgatggaacacttgttgcagtcaaacggcttaaagaagagcgaaccccaggtggcgagctccagtttcagacagaagtggagatgataagcatggccgttcacagaaatctcctcaggctacgcggtttctgtatgacccctaccgagagattgcttgtttatccttacatggctaatggaagtgtcgcttcctgtttgagagaacgtccaccatcacagttgcctctagcctggtcaataagacagcaaatcgcgctaggatcagcgaggggtttgtcttatcttcatgatcattgcgaccccaaaattattcaccgtgatgtgaaagctgctaatattctgttggacgaggaatttgaggcggtggtaggtgatttcgggttagctagacttatggactataaagatactcatgtcacaacggctgtgcgtgggactattggacacattgctcctgagtatctctcaactggaaaatcttcagagaaaactgatgtttttggctacgggatcatgcttttggaactgattacaggtcagagagcttttgatcttgcaagactggcgaatgacgatgacgttatgctcctagattgggtgaaagggcttttgaaggagaagaagctggagatgcttgtggatcctgacctgcaaagcaattacacagaagcagaagtagaacagctcatacaagtggctcttctctgcacacagagctcacctatggaacgacctaagatgtctgaggttgttcgaatgcttgaaggtgacggtttagcggagaaatgggacgagtggcagaaagtggaagttctcaggcaagaagtggagctctcttctcaccccacctctgactggatccttgattcgactgataatcttcatgctatggagttgtctggtccaagataa

SEQ ID NO: 174 - protein, 628 aa, Arabidopsis thaliana
MGRKKFEAFGFVCLISLLLLFNSLWLASSNMEGDALHSLRANLVDPNNVLQSWDPTLVNPCTWFHVTCNNENSVIRVDLGNADLSGQLVPQLGQLKNLQYLELYSNNITGPVPSDLGNLTNLVSLDLYLNSFTGPIPDSLGKLFKLRFLRLNNNSLTGPIPMSLTNIMTLQVLDLSNNRLSGSVPDNGSFSLFTPISFANNLDLCGPVTSRPCPGSPPFSPPPPFIPPPIVPTPGGYSATGAIAGGVAAGAALLFAAPALAFAWWRRRKPQEFFFDVPAEEDPEVHLGQLKRFSLRELQVATDSFSNKNILGRGGFGKVYKGRLADGTLVAVKRLKEERTPGGELQFQTEVEMISMAVHRNLLRLRGFCMTPTERLLVYPYMANGSVASCLRERPPSQLPLAWSIRQQIALGSARGLSYLHDHCDPKIIHRDVKAANILLDEEFEAVVGDFGLARLMDYKDTHVTTAVRGTIGHIAPEYLSTGKSSEKTDVFGYGIMLLELITGQRAFDLARLANDDDVMLLDWVKGLLKEKKLEMLVDPDLQSNYTEAEVEQLIQVALLCTQSSPMERPKMSEVVRMLEGDGLAEKWDEWQKVEVLRQEVELSSHPTSDWILDSTDNLHAMELSGPR

SEQ ID NO: 175 - DNA, 1899 bp, Arabidopsis thaliana
  CDS (1)..(1899)
atggaaggtgtgagatttgtggtgtggagattaggatttctggtttttgtatggttctttgatatctcttctgctacactttctcctactggtgtaaactatgaagtgacagctttggttgctgtgaagaatgaattgaatgatccgtacaaagttcttgagaattgggatgtgaattcagttgatccttgtagctggagaatggtttcttgcactgatggctatgtctcttcactggatcttcctagccaaagcttgtctggtacattgtctcctagaatcggaaacctcacctatttacaatcagtggtgttgcaaaacaatgcaatcactggtccaattccggaaacgattgggaggttggagaagcttcagtcacttgatctttcgaacaattcattcaccggggagataccggcctcacttggagaactcaagaacttgaattacttgcggttaaacaataacagtcttataggaacttgccctgagtctctatccaagattgagggactcactctagtcgacatttcgtataacaatcttagtggttcgctgccaaaagtttctgccagaactttcaaggtaattggtaatgcgttaatctgtggcccaaaagctgtttcaaactgttctgctgttcccgagcctctcacgcttccacaagatggtccagatgaatcaggaactcgtaccaatggccatcacgttgctcttgcatttgccgcaagcttcagtgcagcattttttgttttctttacaagcggaatgtttctttggtggagatatcgccgtaacaagcaaatattttttgacgttaatgaacaatatgatccagaagtgagtttagggcacttgaagaggtatacattcaaagagcttagatctgccaccaatcatttcaactcgaagaacattctcggaagaggcggatacgggattgtgtacaaaggacacttaaacgatggaactttggtggctgtcaaacgtctcaaggactgtaacattgcgggtggagaagtccagtttcagacagaagtagagactataagtttggctcttcatcgcaatctcctccggctccgcggtttctgtagtagcaaccaggagagaattttagtctacccttacatgccaaatgggagtgtcgcatcacgcttaaaagataatatccgtggagagccagcattagactggtcgagaaggaagaagatagcggttgggacagcgagaggactagtttacctacacgagcaatgtgacccgaagattatacaccgcgatgtgaaagcagctaacattctgttagatgaggacttcgaagcagttgttggtgattttgggttagctaagcttctagaccatagagactctcatgtcacaactgcagtccgtggaactgttggccacattgcacctgagtacttatccacgggtcagtcctcagagaagactgatgtctttggctttggcatacttctccttgagctcattactggtcagaaagctcttgattttggcagatccgcacaccagaaaggtgtaatgcttgactgggtgaagaagctgcaccaagaagggaaactaaagcagttaatagacaaagatctaaatgacaagttcgatagagtagaactcgaagaaatcgttcaagttgcgctactctgcactcaattcaatccatctcatcgaccgaaaatgtcagaagttatgaagatgcttgaaggtgacggtttggctgagagatgggaagcgacgcagaacggtactggtgagcatcagccaccgccattgccaccggggatggtgagttcttcgccgcgtgtgaggtattactcggattatattcaggaatcgtctcttgtagtagaagccattgagctctcgggtcctcgatga

SEQ ID NO: 176 - protein, 632 aa, Arabidopsis thaliana
MEGVRFVVWRLGFLVFVWFFDISSATLSPTGVNYEVTALVAVKNELNDPYKVLENWDVNSVDPCSWRMVSCTDGYVSSLDLPSQSLSGTLSPRIGNLTYLQSVVLQNNAITGPIPETIGRLEKLQSLDLSNNSFTGEIPASLGELKNLNYLRLNNNSLIGTCPESLSKIEGLTLVDISYNNLSGSLPKVSARTFKVIGNALICGPKAVSNCSAVPEPLTLPQDGPDESGTRTNGHHVALAFAASFSAAFFVFFTSGMFLWWRYRRNKQIFFDVNEQYDPEVSLGHLKRYTFKELRSATNHFNSKNILGRGGYGIVYKGHLNDGTLVAVKRLKDCNIAGGEVQFQTEVETISLALHRNLLRLRGFCSSNQERILVYPYMPNGSVASRLKDNIRGEPALDWSRRKKIAVGTARGLVYLHEQCDPKIIHRDVKAANILLDEDFEAVVGDFGLAKLLDHRDSHVTTAVRGTVGHIAPEYLSTGQSSEKTDVFGFGILLLELITGQKALDFGRSAHQKGVMLDWVKKLHQEGKLKQLIDKDLNDKFDRVELEEIVQVALLCTQFNPSHRPKMSEVMKMLEGDGLAERWEATQNGTGEHQPPPLPPGMVSSSPRVRYYSDYIQESSLVVEAIELSGPR

SEQ ID NO: 177 - DNA, 1878 bp, Arabidopsis thaliana
  CDS (1)..(1878)
atggagtcgagttatgtggtgtttatcttactttcactgatcttacttccgaatcattcactgtggcttgcttctgctaatttggaaggtgatgctttgcatactttgagggttactctagttgatccaaacaatgtcttgcagagctgggatcctacgctagtgaatccttgcacatggttccatgtcacttgcaacaacgagaacagtgtcataagagttgatttggggaatgcagagttatctggccatttagttccagagcttggtgtgctcaagaatttgcagtatttggagctttacagtaacaacataactggcccgattcctagtaatcttggaaatctgacaaacttagtgagtttggatctttacttaaacagcttctccggtcctattccggaatcattgggaaagctttcaaagctgagatttctccggcttaacaacaacagtctcactgggtcaattcctatgtcactgaccaatattactacccttcaagtgttagatctatcaaataacagactctctggttcagttcctgacaatggctccttctcactcttcacacccatcagttttgctaataacttagacctatgtggacctgttacaagtcacccatgtcctggatctcccccgttttctcctccaccaccttttattcaacctcccccagtttccaccccgagtgggtatggtataactggagcaatagctggtggagttgctgcaggtgctgctttgctctttgctgctcctgcaatagcctttgcttggtggcgacgaagaaagccactagatattttcttcgatgtccctgccgaagaagatccagaagttcatctgggacagctcaagaggttttctttgcgggagctacaagtggcgagtgatgggtttagtaacaagaacattttgggcagaggtgggtttgggaaagtctacaagggacgcttggcagacggaactcttgttgctgtcaagagactgaaggaagagcgaactccaggtggagagctccagtttcaaacagaagtagagatgataagtatggcagttcatcgaaacctgttgagattacgaggtttctgtatgacaccgaccgagagattgcttgtgtatccttacatggccaatggaagtgttgcttcgtgtctcagagagaggccaccgtcacaacctccgcttgattggccaacgcggaagagaatcgcgctaggctcagctcgaggtttgtcttacctacatgatcactgcgatccgaagatcattcaccgtgacgtaaaagcagcaaacatcctcttagacgaagaattcgaagcggttgttggagatttcgggttggcaaagctaatggactataaagacactcacgtgacaacagcagtccgtggcaccatcggtcacatcgctccagaatatctctcaaccggaaaatcttcagagaaaaccgacgttttcggatacggaatcatgcttctagaactaatcacaggacaaagagctttcgatctcgctcggctagctaacgacgacgacgtcatgttacttgactgggtgaaaggattgttgaaggagaagaagctagagatgttagtggatccagatcttcaaacaaactacgaggagagagaactggaacaagtgatacaagtggcgttgctatgcacgcaaggatcaccaatggaaagaccaaagatgtctgaagttgtaaggatgctggaaggagatgggcttgcggagaaatgggacgaatggcaaaaagttgagattttgagggaagagattgatttgagtcctaatcctaactctgattggattcttgattctacttacaatttgcacgccgttgagttatctggtccaaggtaa

SEQ ID NO: 178 - protein, 625 aa, Arabidopsis thaliana
MESSYVVFILLSLILLPNHSLWLASANLEGDALHTLRVTLVDPNNVLQSWDPTLVNPCTWFHVTCNNENSVIRVDLGNAELSGHLVPELGVLKNLQYLELYSNNITGPIPSNLGNLTNLVSLDLYLNSFSGPIPESLGKLSKLRFLRLNNNSLTGSIPMSLTNITTLQVLDLSNNRLSGSVPDNGSFSLFTPISFANNLDLCGPVTSHPCPGSPPFSPPPPFIQPPPVSTPSGYGITGAIAGGVAAGAALLFAAPAIAFAWWRRRKPLDIFFDVPAEEDPEVHLGQLKRFSLRELQVASDGFSNKNILGRGGFGKVYKGRLADGTLVAVKRLKEERTPGGELQFQTEVEMISMAVHRNLLRLRGFCMTPTERLLVYPYMANGSVASCLRERPPSQPPLDWPTRKRIALGSARGLSYLHDHCDPKIIHRDVKAANILLDEEFEAVVGDFGLAKLMDYKDTHVTTAVRGTIGHIAPEYLSTGKSSEKTDVFGYGIMLLELITGQRAFDLARLANDDDVMLLDWVKGLLKEKKLEMLVDPDLQTNYEERELEQVIQVALLCTQGSPMERPKMSEVVRMLEGDGLAEKWDEWQKVEILREEIDLSPNPNSDWILDSTYNLHAVELSGPR

SEQ ID NO: 179 - DNA, 1863 bp, Arabidopsis thaliana
  CDS (1)..(1863)
atgacaagttcaaaaatggaacaaagatcactcctttgcttcctttatctgctcctactattcaatttcactctcagagtcgctggaaacgctgaaggtgatgctttgactcagctgaaaaacagtttgtcatcaggtgaccctgcaaacaatgtactccaaagctgggatgctactcttgttactccatgtacttggtttcatgttacttgcaatcctgagaataaagttactcgtgttgaccttgggaatgcaaaactatctggaaagttggttccagaacttggtcagcttttaaacttgcagtacttggagctttatagcaataacattacaggggagatacctgaggagcttggcgacttggtggaactagtaagcttggatctttacgcaaacagcataagcggtcccatcccttcgtctcttggcaaactaggaaaactccggttcttgcgtcttaacaacaatagcttatcaggggaaattccaatgactttgacttctgtgcagctgcaagttctggatatctcaaacaatcggctcagtggagatattcctgttaatggttctttttcgctcttcactcctatcagttttgcgaataatagcttaacggatcttcccgaacctccgcctacttctacctctcctacgccaccaccaccttcaggggggcaaatgactgcagcaatagcagggggagttgctgcaggtgcagcacttctatttgctgttccagccattgcgtttgcttggtggctcagaagaaaaccacaggaccacttttttgatgtacctgctgaagaagacccagaggttcatttaggacaactcaaaaggtttaccttgcgtgaactgttagttgctactgataactttagcaataaaaatgtattgggtagaggtggttttggtaaagtgtataaaggacgtttagccgatggcaatctagtggctgtcaaaaggctaaaagaagaacgtaccaagggtggggaactgcagtttcaaaccgaagttgagatgatcagtatggccgttcataggaacttgcttcggcttcgtggcttttgcatgactccaactgaaagattacttgtttatccctacatggctaatggaagtgttgcttcttgtttaagagagcgtcctgaaggcaatccagcacttgattggccaaaaagaaagcatattgctctgggatcagcaagggggcttgcgtatttacatgatcattgcgaccaaaaaatcattcaccgggatgttaaagctgctaatatattgttagatgaagagtttgaagctgttgttggagattttgggctcgcaaaattaatgaattataatgactcccatgtgacaactgctgtacgcggtacaattggccatatagcgcccgagtacctctcgacaggaaaatcttctgagaagactgatgtttttgggtacggggtcatgcttctcgagctcatcactggacaaaaggctttcgatcttgctcggcttgcaaatgatgatgatatcatgttactcgactgggtgaaagaggttttgaaagagaagaagttggaaagccttgtggatgcagaactcgaaggaaagtacgtggaaacagaagtggagcagctgatacaaatggctctgctctgcactcaaagttctgcaatggaacgtccaaagatgtcagaagtagtgagaatgctggaaggagatggtttagctgagagatgggaagaatggcaaaaggaggagatgccaatacatgattttaactatcaagcctatcctcatgctggcactgactggctcatcccctattccaattcccttatcgaaaacgattacccctcgggtccaagataa

SEQ ID NO: 180 - protein, 620 aa, Arabidopsis thaliana
MTSSKMEQRSLLCFLYLLLLFNFTLRVAGNAEGDALTQLKNSLSSGDPANNVLQSWDATLVTPCTWFHVTCNPENKVTRVDLGNAKLSGKLVPELGQLLNLQYLELYSNNITGEIPEELGDLVELVSLDLYANSISGPIPSSLGKLGKLRFLRLNNNSLSGEIPMTLTSVQLQVLDISNNRLSGDIPVNGSFSLFTPISFANNSLTDLPEPPPTSTSPTPPPPSGGQMTAAIAGGVAAGAALLFAVPAIAFAWWLRRKPQDHFFDVPAEEDPEVHLGQLKRFTLRELLVATDNFSNKNVLGRGGFGKVYKGRLADGNLVAVKRLKEERTKGGELQFQTEVEMISMAVHRNLLRLRGFCMTPTERLLVYPYMANGSVASCLRERPEGNPALDWPKRKHIALGSARGLAYLHDHCDQKIIHRDVKAANILLDEEFEAVVGDFGLAKLMNYNDSHVTTAVRGTIGHIAPEYLSTGKSSEKTDVFGYGVMLLELITGQKAFDLARLANDDDIMLLDWVKEVLKEKKLESLVDAELEGKYVETEVEQLIQMALLCTQSSAMERPKMSEVVRMLEGDGLAERWEEWQKEEMPIHDFNYQAYPHAGTDWLIPYSNSLIENDYPSGPR

SEQ ID NO: 181 - DNA, 1806 bp, Arabidopsis thaliana
  CDS (1)..(1806)
atggaacatggatcatcccgtggctttatttggctgattctatttctcgattttgtttccagagtcaccggaaaaacacaagttgatgctctcattgctctaagaagcagtttatcatcaggtgaccatacaaacaatatactccaaagctggaatgccactcacgttactccatgttcatggtttcatgttacttgcaatactgaaaacagtgttactcgtcttgacctggggagtgctaatctatctggagaactggtgccacagcttgctcagcttccaaatttgcagtacttggaactttttaacaataatattactggggagatacctgaggagcttggcgacttgatggaactagtaagcttggacctttttgcaaacaacataagcggtcccatcccttcctctcttggcaaactaggaaaactccgcttcttgcgtctttataacaacagcttatctggagaaattccaaggtctttgactgctctgccgctggatgttcttgatatctcaaacaatcggctcagtggagatattcctgttaatggttccttttcgcagttcacttctatgagttttgccaataataaattaaggccgcgacctgcatctccttcaccatcaccttcaggaacgtctgcagcaatagtagtgggagttgctgcgggtgcagcacttctatttgcgcttgcttggtggctgagaagaaaactgcagggtcactttcttgatgtacctgctgaagaagacccagaggtttatttaggacaatttaaaaggttctccttgcgtgaactgctagttgctacagagaaatttagcaaaagaaatgtattgggcaaaggacgttttggtatattgtataaaggacgtttagctgatgacactctagtggctgtgaaacggctaaatgaagaacgtaccaagggtggggaactgcagtttcaaaccgaagttgagatgatcagtatggccgttcataggaacttgcttcggcttcgtggcttttgcatgactccaactgaaagattacttgtttatccctacatggctaatggaagtgttgcttcttgtttaagagagcgtcctgaaggcaatccagcccttgactggccaaaaagaaagcatattgctctgggatcagcaagggggctcgcatatttacacgatcattgcgaccaaaagatcattcacctggatgtgaaagctgcaaatatactgttagatgaagagtttgaagctgttgttggagattttgggctagcaaaattaatgaattataacgactcccatgtgacaactgctgtacggggtacgattggccatatagcgcccgagtacctctcgacaggaaaatcttctgagaagactgatgtttttgggtacggggtcatgcttctcgagctcatcactggacaaaaggctttcgatcttgctcggcttgcaaatgatgatgatatcatgttactcgactgggtgaaagaggttttgaaagagaagaagttggaaagccttgtggatgcagaactcgaaggaaagtacgtggaaacagaagtggagcagctgatacaaatggctctgctctgcactcaaagttctgcaatggaacgtccaaagatgtcagaagtagtgagaatgctggaaggagatggtttagctgagagatgggaagaatggcaaaaggaggagatgccaatacatgattttaactatcaagcctatcctcatgctggcactgactggctcatcccctattccaattcccttatcgaaaacgattacccctcggggccaagataa

SEQ ID NO: 182 - protein, 601 aa, Arabidopsis thaliana
MEHGSSRGFIWLILFLDFVSRVTGKTQVDALIALRSSLSSGDHTNNILQSWNATHVTPCSWFHVTCNTENSVTRLDLGSANLSGELVPQLAQLPNLQYLELFNNNITGEIPEELGDLMELVSLDLFANNISGPIPSSLGKLGKLRFLRLYNNSLSGEIPRSLTALPLDVLDISNNRLSGDIPVNGSFSQFTSMSFANNKLRPRPASPSPSPSGTSAAIVVGVAAGAALLFALAWWLRRKLQGHFLDVPAEEDPEVYLGQFKRFSLRELLVATEKFSKRNVLGKGRFGILYKGRLADDTLVAVKRLNEERTKGGELQFQTEVEMISMAVHRNLLRLRGFCMTPTERLLVYPYMANGSVASCLRERPEGNPALDWPKRKHIALGSARGLAYLHDHCDQKIIHLDVKAANILLDEEFEAVVGDFGLAKLMNYNDSHVTTAVRGTIGHIAPEYLSTGKSSEKTDVFGYGVMLLELITGQKAFDLARLANDDDIMLLDWVKEVLKEKKLESLVDAELEGKYVETEVEQLIQMALLCTQSSAMERPKMSEVVRMLEGDGLAERWEEWQKEEMPIHDFNYQAYPHAGTDWLIPYSNSLIENDYPSGPR

SEQ ID NO: 183 - DNA, 1905 bp, Arabidopsis thaliana
  CDS (1)..(1905)
atggtggtgatgaagttaataacaatgaagatattctctgttctgttactactatgtttcttcgttacttgttctctctcttctgaacccagaaaccctgaagtggaggcgttgataaacataaagaacgagttacatgatccacatggtgttttcaaaaactgggatgagttttctgttgatccttgtagctggactatgatctcttgttcttcagacaacctcgtaattggcttaggagctccaagtcagtctctttcaggaactttatctgggtctattggaaatctcactaatcttcgacaagtgtcattacagaacaataacatctccggtaaaatcccaccggagatttgttctcttcccaaattacagactctggatttatccaataaccggttctccggtgaaatccccggttctgttaaccagctgagtaatctccaatatctgaggttgaacaacaactcattatctgggccctttcctgcttctctgtctcaaatccctcacctctctttcttagacttgtcttataacaatctcagaggtcctgttcctaaatttcctgcaaggacattcaatgttgctgggaaccctttgatttgtaaaaacagcctaccggagatttgttcaggatcaatcagtgcaagccctctttctgtctctttacgttcttcatcaggacgtagaaccaacatattagcagttgcacttggtgtaagccttggctttgctgttagtgtaatcctctctctcgggttcatttggtatcgaaagaaacaaagacggttaacgatgcttcgcattagtgacaagcaagaggaagggttacttgggttgggaaatctaagaagcttcacattcagggaacttcatgtagctacggatggttttagttccaagagtattcttggtgctggtgggtttggtaatgtctacagaggaaaattcggggatgggacagtggttgcagtgaaacgattgaaagatgtgaatggaacctccgggaactcacagtttcgtactgagcttgagatgatcagcttagctgttcataggaatttgcttcggttaatcggttattgtgcgagttctagcgaaagacttcttgtttacccttacatgtccaatggcagcgtcgcctctaggctcaaagctaagccagcgttggactggaacacaaggaagaagatagcgattggagctgcaagagggttgttttatctacacgagcaatgcgatcccaagattattcaccgagatgtcaaggcagcaaacattctcctagatgagtattttgaagcagttgttggggattttggactagcaaagctactcaaccacgaggattcacatgtcacaaccgcggttagaggaactgttggtcacattgcacctgagtatctctccaccggtcagtcatctgagaaaaccgatgtctttgggttcggtatacttttgctagagctcatcacaggaatgagagctctcgagtttggcaagtctgttagccagaaaggagctatgctagaatgggtgaggaagctacacaaggaaatgaaagtagaggagctagtagaccgagaactggggacaacctacgatagaatagaagttggagagatgctacaagtggcactgctctgcactcagtttcttccagctcacagacccaaaatgtctgaagtagttcagatgcttgaaggagatggattagctgagagatgggctgcttcacatgaccattcacatttctaccatgccaacatgtcttacaggactattacctctactgatggcaacaaccaaaccaaacatctgtttggctcctcaggatttgaagatgaagatgataatcaagcgttagattcattcgccatggaactatctggtccaaggtag

SEQ ID NO: 184 - protein, 634 aa, Arabidopsis thaliana
MVVMKLITMKIFSVLLLLCFFVTCSLSSEPRNPEVEALINIKNELHDPHGVFKNWDEFSVDPCSWTMISCSSDNLVIGLGAPSQSLSGTLSGSIGNLTNLRQVSLQNNNISGKIPPEICSLPKLQTLDLSNNRFSGEIPGSVNQLSNLQYLRLNNNSLSGPFPASLSQIPHLSFLDLSYNNLRGPVPKFPARTFNVAGNPLICKNSLPEICSGSISASPLSVSLRSSSGRRTNILAVALGVSLGFAVSVILSLGFIWYRKKQRRLTMLRISDKQEEGLLGLGNLRSFTFRELHVATDGFSSKSILGAGGFGNVYRGKFGDGTVVAVKRLKDVNGTSGNSQFRTELEMISLAVHRNLLRLIGYCASSSERLLVYPYMSNGSVASRLKAKPALDWNTRKKIAIGAARGLFYLHEQCDPKIIHRDVKAANILLDEYFEAVVGDFGLAKLLNHEDSHVTTAVRGTVGHIAPEYLSTGQSSEKTDVFGFGILLLELITGMRALEFGKSVSQKGAMLEWVRKLHKEMKVEELVDRELGTTYDRIEVGEMLQVALLCTQFLPAHRPKMSEVVQMLEGDGLAERWAASHDHSHFYHANMSYRTITSTDGNNQTKHLFGSSGFEDEDDNQALDSFAMELSGPR

SEQ ID NO: 185 - DNA, 1908 bp, Arabidopsis thaliana
  CDS (1)..(1908)
atgttgcaaggaagaagagaagcaaaaaagagttatgctttgttctcttcaactttcttcttcttctttatctgttttctttcttcttcttctgcagaactcacagacaaaggtgttaactttgaagttgttgccttaataggaatcaaaagctcactgactgatcctcatggagttctaatgaattgggatgacacagcagttgatccatgtagctggaacatgatcacttgttctgatggttttgtcataaggctagaagctccaagccaaaacttatcaggaactctttcatcaagtattggaaatttaacaaatcttcaaactgtgttattgcagaacaattacataacaggaaacatccctcatgagattgggaaattgatgaaactcaaaacacttgatctctctaccaataacttcactggtcaaatcccattcactctttcttactccaaaaatcttcagtacttgagggttaataataacagcctgacaggaacaattcctagctcattggcaaacatgacccaactcacttttttggatttgtcgtataataacttgagtggaccagttccaagatcacttgccaaaacattcaatgttatgggcaattctcagatttgtccaacaggaactgagaaagactgtaatgggactcagcctaagccaatgtcaatcaccttgaacagttctcaaaataaatcatctgatggaggaactaaaaaccggaaaatcgcggtagtcttcggtgtaagcttgacatgtgtttgcttgttgatcattggctttggttttcttctttggtggagaagaagacataacaaacaagtattattctttgacattaatgagcaaaacaaggaagaaatgtgtctagggaatctaaggaggtttaatttcaaagaacttcaatccgcaactagtaacttcagcagcaagaatctggtcggaaaaggagggtttggaaatgtgtataaaggttgtcttcatgatggaagtatcatcgcggtgaagagattaaaggatataaacaatggtggtggagaggttcagtttcagacagagcttgaaatgataagccttgccgtccaccggaatctcctccgcttatacggtttctgtactacttcctctgaacggcttctcgtttatccttacatgtccaatggcagtgtcgcttctcgtctcaaagctaaaccggtattggattggggcacaagaaagcgaatagcattaggagcaggaagagggttgctgtatttgcatgagcaatgtgatccaaagatcattcaccgtgatgtcaaagctgcgaacatacttcttgacgattactttgaagctgttgtcggagatttcgggttggctaagcttttggatcatgaggagtcgcatgtgacaaccgccgtgagaggaacagtgggtcacattgcacctgagtatctctcaacaggacaatcttctgagaagacagatgtgttcggtttcgggattcttcttctcgaattgattactggattgagagctcttgaattcggaaaagcagcaaaccaaagaggagcgatacttgattgggtaaagaaactacaacaagagaagaagctagaacagatagtagacaaggatttgaagagcaactacgatagaatagaagtggaagaaatggttcaagtggctttgctttgtacacagtatcttcccattcaccgtcctaagatgtctgaagttgtgagaatgcttgaaggcgatggtcttgttgagaaatgggaagcttcttctcagagagcagaaaccaatagaagttacagtaaacctaacgagttttcttcctctgaacgttattcggatcttacagatgattcctcggtgctggttcaagccatggagttatcaggtccaagatga

SEQ ID NO: 186 - protein, 635 aa, Arabidopsis thaliana
MLQGRREAKKSYALFSSTFFFFFICFLSSSSAELTDKGVNFEVVALIGIKSSLTDPHGVLMNWDDTAVDPCSWNMITCSDGFVIRLEAPSQNLSGTLSSSIGNLTNLQTVLLQNNYITGNIPHEIGKLMKLKTLDLSTNNFTGQIPFTLSYSKNLQYLRVNNNSLTGTIPSSLANMTQLTFLDLSYNNLSGPVPRSLAKTFNVMGNSQICPTGTEKDCNGTQPKPMSITLNSSQNKSSDGGTKNRKIAVVFGVSLTCVCLLIIGFGFLLWWRRRHNKQVLFFDINEQNKEEMCLGNLRRFNFKELQSATSNFSSKNLVGKGGFGNVYKGCLHDGSIIAVKRLKDINNGGGEVQFQTELEMISLAVHRNLLRLYGFCTTSSERLLVYPYMSNGSVASRLKAKPVLDWGTRKRIALGAGRGLLYLHEQCDPKIIHRDVKAANILLDDYFEAVVGDFGLAKLLDHEESHVTTAVRGTVGHIAPEYLSTGQSSEKTDVFGFGILLLELITGLRALEFGKAANQRGAILDWVKKLQQEKKLEQIVDKDLKSNYDRIEVEEMVQVALLCTQYLPIHRPKMSEVVRMLEGDGLVEKWEASSQRAETNRSYSKPNEFSSSERYSDLTDDSSVLVQAMELSGPR

SEQ ID NO: 187 - DNA, 1947 bp, Arabidopsis thaliana
  CDS (1)..(1947)
atggtagtagtaacaaagaagaccatgaagattcaaattcatctcctttactcgttcttgttcctctgtttctctactctcactctatcttctgagcccagaaaccctgaagttgaggcgttgataagtataaggaacaatttgcatgatcctcatggagctttgaacaattgggacgagttttcagttgatccttgtagctgggctatgatcacttgctctcccgacaacctcgtcattggactaggagcgccgagccagtctctctcgggaggtttatctgagtctatcggaaatctcacaaatctccgacaagtgtcattgcaaaataacaacatctccggcaaaattccaccggagctcggttttctacccaaattacaaaccttggatctttccaacaaccgattctccggtgacatccctgtttccatcgaccagctaagcagccttcaatatctgagactcaacaacaactctttgtctgggcccttccctgcttctttgtcccaaattcctcacctctccttcttggacttgtcttacaacaatctcagtggccctgttcctaaattcccagcaaggactttcaacgttgctggtaatcctttgatttgtagaagcaacccacctgagatttgttctggatcaatcaatgcaagtccactttctgtttctttgagctcttcatcaggacgcaggtctaatagattggcaatagctcttagtgtaagccttggctctgttgttatactagtccttgctctcgggtccttttgttggtaccgaaagaaacaaagaaggctactgatccttaacttaaacgataaacaagaggaagggcttcaaggacttgggaatctaagaagcttcacattcagagaactccatgtttatacagatggtttcagttccaagaacattctcggcgctggtggattcggtaatgtgtacagaggcaagcttggagatgggacaatggtggcagtgaaacggttgaaggatattaatggaacctcaggggattcacagtttcgtatggagctagagatgattagcttagctgttcataagaatctgcttcggttaattggttattgcgcaacttctggtgaaaggcttcttgtttacccttacatgcctaatggaagcgtcgcctctaagcttaaatctaaaccggcattggactggaacatgaggaagaggatagcaattggtgcagcgagaggtttgttgtatctacatgagcaatgtgatcccaagatcattcatagagatgtaaaggcagctaatattctcttagacgagtgctttgaagctgttgttggtgactttggactcgcaaagctccttaaccatgcggattctcatgtcacaactgcggtccgtggtacggttggccacattgcacctgaatatctctccactggtcagtcttctgagaaaaccgatgtgtttgggttcggtatactattgctcgagctcataaccggactgagagctcttgagtttggtaaaaccgttagccagaaaggagctatgcttgaatgggtgaggaaattacatgaagagatgaaagtagaggaactattggatcgagaactcggaactaactacgataagattgaagttggagagatgttgcaagtggctttgctatgcacacaatatctgccagctcatcgtcctaaaatgtctgaagttgttttgatgcttgaaggcgatggattagccgagagatgggctgcttcgcataaccattcacatttctaccatgccaatatctctttcaagacaatctcttctctgtctactacttctgtctcaaggcttgacgcacattgcaatgatccaacttatcaaatgtttggatcttcggctttcgatgatgacgatgatcatcagcctttagattcctttgccatggaactatccggtccaagataa

SEQ ID NO: 188 - protein, 648 aa, Arabidopsis thaliana
MVVVTKKTMKIQIHLLYSFLFLCFSTLTLSSEPRNPEVEALISIRNNLHDPHGALNNWDEFSVDPCSWAMITCSPDNLVIGLGAPSQSLSGGLSESIGNLTNLRQVSLQNNNISGKIPPELGFLPKLQTLDLSNNRFSGDIPVSIDQLSSLQYLRLNNNSLSGPFPASLSQIPHLSFLDLSYNNLSGPVPKFPARTFNVAGNPLICRSNPPEICSGSINASPLSVSLSSSSGRRSNRLAIALSVSLGSVVILVLALGSFCWYRKKQRRLLILNLNDKQEEGLQGLGNLRSFTFRELHVYTDGFSSKNILGAGGFGNVYRGKLGDGTMVAVKRLKDINGTSGDSQFRMELEMISLAVHKNLLRLIGYCATSGERLLVYPYMPNGSVASKLKSKPALDWNMRKRIAIGAARGLLYLHEQCDPKIIHRDVKAANILLDECFEAVVGDFGLAKLLNHADSHVTTAVRGTVGHIAPEYLSTGQSSEKTDVFGFGILLLELITGLRALEFGKTVSQKGAMLEWVRKLHEEMKVEELLDRELGTNYDKIEVGEMLQVALLCTQYLPAHRPKMSEVVLMLEGDGLAERWAASHNHSHFYHANISFKTISSLSTTSVSRLDAHCNDPTYQMFGSSAFDDDDDHQPLDSFAMELSGPR

SEQ ID NO: 189 - DNA, 1842 bp, Arabidopsis thaliana
  CDS (1)..(1842)
atgagaatgttcagcttgcagaagatggctatggcttttactctcttgttttttgcctgtttatgctcatttgtgtctccagatgctcaaggggatgcactgtttgcgttgaggatctccttacgtgcattaccgaatcagctaagtgactggaatcagaaccaagttaatccttgcacttggtcccaagttatttgtgatgacaaaaactttgtcacttctcttacattgtcagatatgaacttctcgggaaccttgtcttcaagagtaggaatcctagaaaatctcaagactcttactttaaagggaaatggaattacgggtgaaataccagaagactttggaaatctgactagcttgactagtttggatttggaggacaatcagctaactggtcgtataccatccactatcggtaatctcaagaaacttcagttcttgaccttgagtaggaacaaacttaatgggactattccggagtcactcactggtcttccaaacctgttaaacctgctgcttgattccaatagtctcagtggtcagattcctcaaagtctgtttgagatcccaaaatataatttcacgtcaaacaacttgaattgtggcggtcgtcaacctcacccttgtgtatccgcggttgcccattcaggtgattcaagcaagcctaaaactggcattattgctggagttgttgctggagttacagttgttctctttggaatcttgttgtttctgttctgcaaggataggcataaaggatatagacgtgatgtgtttgtggatgttgcaggtgaagtggacaggagaattgcatttggacagttgaaaaggtttgcatggagagagctccagttagcgacagataacttcagcgaaaagaatgtacttggtcaaggaggctttgggaaagtttacaaaggagtgcttccggataacaccaaagttgctgtgaagagattgacggatttcgaaagtcctggtggagatgctgctttccaaagggaagtagagatgataagtgtagctgttcataggaatctactccgtcttatcgggttctgcaccacacaaacagaacgccttttggtttatcccttcatgcagaatctaagtcttgcacatcgtctgagagagatcaaagcaggcgacccggttctagattgggagacgaggaaacggattgccttaggagcagcgcgtggttttgagtatcttcatgaacattgcaatccgaagatcatacatcgtgatgtgaaagcagctaatgtgttactagatgaagattttgaagcagtggttggtgattttggtttagccaagctagtagatgttagaaggactaatgtgactactcaagttcgaggaacaatgggtcacattgcaccagaatatttatcaacagggaaatcatcagagagaaccgatgttttcgggtatggaattatgcttcttgagcttgttacaggacaacgcgcaatagacttttcacgtttggaggaagaagatgatgtcttgttacttgaccacgtgaagaaactggaaagagagaagagattaggagcaatcgtagataagaatttggatggagagtatataaaagaagaagtagagatgatgatacaagtggctttgctttgtacacaaggttcaccagaagaccgaccagtgatgtctgaagttgtgaggatgttagaaggagaagggcttgcggagagatgggaagagtggcaaaacgtggaagtcacgagacgtcatgagtttgaacggttgcagaggagatttgattggggtgaagattctatgcataaccaagatgccattgaattatctggtggaagatga

SEQ ID NO: 190 - protein, 613 aa, Arabidopsis thaliana
MRMFSLQKMAMAFTLLFFACLCSFVSPDAQGDALFALRISLRALPNQLSDWNQNQVNPCTWSQVICDDKNFVTSLTLSDMNFSGTLSSRVGILENLKTLTLKGNGITGEIPEDFGNLTSLTSLDLEDNQLTGRIPSTIGNLKKLQFLTLSRNKLNGTIPESLTGLPNLLNLLLDSNSLSGQIPQSLFEIPKYNFTSNNLNCGGRQPHPCVSAVAHSGDSSKPKTGIIAGVVAGVTVVLFGILLFLFCKDRHKGYRRDVFVDVAGEVDRRIAFGQLKRFAWRELQLATDNFSEKNVLGQGGFGKVYKGVLPDNTKVAVKRLTDFESPGGDAAFQREVEMISVAVHRNLLRLIGFCTTQTERLLVYPFMQNLSLAHRLREIKAGDPVLDWETRKRIALGAARGFEYLHEHCNPKIIHRDVKAANVLLDEDFEAVVGDFGLAKLVDVRRTNVTTQVRGTMGHIAPEYLSTGKSSERTDVFGYGIMLLELVTGQRAIDFSRLEEEDDVLLLDHVKKLEREKRLGAIVDKNLDGEYIKEEVEMMIQVALLCTQGSPEDRPVMSEVVRMLEGEGLAERWEEWQNVEVTRRHEFERLQRRFDWGEDSMHNQDAIELSGGR

SEQ ID NO: 191 - DNA, 1917 bp, Arabidopsis thaliana
  CDS (1)..(1917)
atggagagtactattgttatgatgatgatgataacaagatctttcttttgcttcttgggatttttatgccttctctgctcttctgttcacggattgctttctcctaaaggtgttaactttgaagtgcaagctttgatggacataaaagcttcattacatgatcctcatggtgttcttgataactgggatagagatgctgttgatccttgtagttggacaatggtcacttgttcttctgaaaactttgtcattggcttaggcacaccaagtcagaatttatctggtacactatctccaagcattaccaacttaacaaatcttcggattgtgctgttgcagaacaacaacataaaaggaaaaattcctgctgagattggtcggcttacgaggcttgagactcttgatctttctgataatttcttccacggtgaaattcctttttcagtaggctatctacaaagcctgcaatatctgaggcttaacaacaattctctctctggagtgtttcctctgtcactatctaatatgactcaacttgcctttcttgatttatcatacaacaatcttagtggtcctgttccaagatttgctgcaaagacgtttagcatcgttgggaacccgctgatatgtccaacgggtaccgaaccagactgcaatggaacaacattgatacctatgtctatgaacttgaatcaaactggagttcctttatacgccggtggatcgaggaatcacaaaatggcaatcgctgttggatccagcgttgggactgtatcattaatcttcattgctgttggtttgtttctctggtggagacaaagacataaccaaaacacattctttgatgttaaagatgggaatcatcatgaggaagtttcacttggaaacctgaggagatttggtttcagggagcttcagattgcgaccaataacttcagcagtaagaacttattggggaaaggtggctatggaaatgtatacaaaggaatacttggagatagtacagtggttgcagtgaaaaggcttaaagatggaggagcattgggaggagagattcagtttcagacagaagttgaaatgatcagtttagctgttcatcgaaatctcttaagactctacggtttctgcatcacacaaactgagaagcttctagtttatccttatatgtctaatggaagcgttgcatctcgaatgaaagcaaaacctgttcttgactggagcataaggaagaggatagccataggagctgcaagagggcttgtgtatctccatgagcaatgtgatccgaagattatccaccgcgatgtcaaagcagcgaatatacttcttgatgactactgtgaagctgtggttggcgattttggtttagctaaactcttggatcatcaagattctcatgtgacaaccgcggttagaggcacggtgggtcacattgctccagagtatctctcaactggtcaatcctctgagaaaacagatgtttttggcttcgggattcttcttcttgagcttgtaaccggacaaagagcttttgagtttggtaaagcggctaaccagaaaggtgtgatgcttgattgggttaaaaagattcatcaagagaagaaacttgagctacttgtggataaagagttgttgaagaagaagagctacgatgagattgagttagacgaaatggtaagagtagctttgttgtgcacacagtacctgccaggacatagaccaaaaatgtctgaagttgttcgaatgctggaaggagatggacttgcagagaaatgggaagcttctcaaagatcagacagtgtttcaaaatgtagcaacaggataaatgaattgatgtcatcttcagacagatactctgatcttaccgatgactctagtttacttgtgcaagcaatggagctctctggtcctagatga

SEQ ID NO: 192 - protein, 638 aa, Arabidopsis thaliana
MESTIVMMMMITRSFFCFLGFLCLLCSSVHGLLSPKGVNFEVQALMDIKASLHDPHGVLDNWDRDAVDPCSWTMVTCSSENFVIGLGTPSQNLSGTLSPSITNLTNLRIVLLQNNNIKGKIPAEIGRLTRLETLDLSDNFFHGEIPFSVGYLQSLQYLRLNNNSLSGVFPLSLSNMTQLAFLDLSYNNLSGPVPRFAAKTFSIVGNPLICPTGTEPDCNGTTLIPMSMNLNQTGVPLYAGGSRNHKMAIAVGSSVGTVSLIFIAVGLFLWWRQRHNQNTFFDVKDGNHHEEVSLGNLRRFGFRELQIATNNFSSKNLLGKGGYGNVYKGILGDSTVVAVKRLKDGGALGGEIQFQTEVEMISLAVHRNLLRLYGFCITQTEKLLVYPYMSNGSVASRMKAKPVLDWSIRKRIAIGAARGLVYLHEQCDPKIIHRDVKAANILLDDYCEAVVGDFGLAKLLDHQDSHVTTAVRGTVGHIAPEYLSTGQSSEKTDVFGFGILLLELVTGQRAFEFGKAANQKGVMLDWVKKIHQEKKLELLVDKELLKKKSYDEIELDEMVRVALLCTQYLPGHRPKMSEVVRMLEGDGLAEKWEASQRSDSVSKCSNRINELMSSSDRYSDLTDDSSLLVQAMELSGPR

SEQ ID NO: 193 - DNA, 1845 bp, Arabidopsis thaliana
  CDS (1)..(1845)
atggagatttctttgatgaagtttctgtttttaggaatctgggtttattattactctgttcttgactctgtttctgccatggatagtcttttatctcccaagggtgttaactatgaagtggctgcgttaatgtcagtgaagaacaagatgaaagatgagaaagaggttttgtctggttgggatattaactctgttgatccttgtacttggaacatggttggttgttcttctgaaggttttgtggtttctctagagatggctagtaaaggattatcagggatactatctactagtattggggaattaactcatcttcatactttgttacttcagaataatcagttaactggtccgattccttctgagttaggccaactctctgagcttgaaacgcttgatttatcggggaatcggtttagtggtgaaatcccagcttctttagggttcttaactcacttaaactacttgcggcttagcaggaatcttttatctgggcaagtccctcacctcgtcgctggcctctcaggtctttctttcttggatctatctttcaacaatctaagcggaccaactccgaatatatcagcaaaagattacaggattgtaggaaatgcatttctttgtggtccagcttcccaagagctttgctcagatgctacacctgtgagaaatgcgacgggtttgtctgaaaaggacaatagcaaacatcacagcttagtgctctcttttgcatttggcattgttgttgcctttatcatctccctaatgtttctcttcttctgggtgctttggcatcgatcacgtctctcaagatcacacgtgcagcaagactacgaatttgaaatcggccatctgaaaaggttcagttttcgcgaaatacaaaccgcaacaagcaattttagtccaaagaacattttgggacaaggagggtttgggatggtttataaagggtatctcccaaatggaactgtggtggcagttaaaagattgaaagatccgatttatacaggagaagttcagtttcaaaccgaagtagagatgattggcttagctgttcaccgtaaccttttacgcctctttggattctgtatgaccccggaagagagaatgcttgtgtatccgtacatgccaaatggaagcgtagctgatcgtctgagagacaattatggagaaaagccgtctctagattggaatcggaggataagcattgcactcggcgcagctcgaggacttgtttacttgcacgagcaatgcaatccaaagattattcacagagacgtcaaagctgcaaatattctacttgatgagagctttgaagcaatagttggcgattttggtctagcaaagcttttagaccagagagattcacatgtcactaccgcagtccgaggaaccattggacacatcgctcccgagtacctttccactggacagtcctcagagaaaaccgatgttttcggattcggagtactaatccttgaactcataacaggtcataagatgattgatcaaggcaatggtcaagttcgaaaaggaatgatattgagctgggtaaggacattgaaagcagagaagagatttgcagagatggtggacagagatttgaagggagagtttgatgatttggtgttggaggaagtagtggaattggctttgctttgtacacagccacatccgaatctaagaccgaggatgtctcaagtgttgaaggtactagaaggtttagtggaacagtgtgaaggagggtatgaagctagagctccaagtgtctctaggaactacagtaatggtcatgaagagcagtcctttattattgaagccattgagctctctggaccacgatga

SEQ ID NO: 194 - protein, 614 aa, Arabidopsis thaliana
MEISLMKFLFLGIWVYYYSVLDSVSAMDSLLSPKGVNYEVAALMSVKNKMKDEKEVLSGWDINSVDPCTWNMVGCSSEGFVVSLEMASKGLSGILSTSIGELTHLHTLLLQNNQLTGPIPSELGQLSELETLDLSGNRFSGEIPASLGFLTHLNYLRLSRNLLSGQVPHLVAGLSGLSFLDLSFNNLSGPTPNISAKDYRIVGNAFLCGPASQELCSDATPVRNATGLSEKDNSKHHSLVLSFAFGIVVAFIISLMFLFFWVLWHRSRLSRSHVQQDYEFEIGHLKRFSFREIQTATSNFSPKNILGQGGFGMVYKGYLPNGTVVAVKRLKDPIYTGEVQFQTEVEMIGLAVHRNLLRLFGFCMTPEERMLVYPYMPNGSVADRLRDNYGEKPSLDWNRRISIALGAARGLVYLHEQCNPKIIHRDVKAANILLDESFEAIVGDFGLAKLLDQRDSHVTTAVRGTIGHIAPEYLSTGQSSEKTDVFGFGVLILELITGHKMIDQGNGQVRKGMILSWVRTLKAEKRFAEMVDRDLKGEFDDLVLEEVVELALLCTQPHPNLRPRMSQVLKVLEGLVEQCEGGYEARAPSVSRNYSNGHEEQSFIIEAIELSGPR

SEQ ID NO: 195 - DNA, 1845 bp, Arabidopsis thaliana
  CDS (1)..(1845)
atggctcactcggggaacggtgaaagtttccatgatcctcttcgaggattcattcaaagaaattgctttagatggaacaatcagaaattgatcttacaatgtttcatggccttagcttttgtgggaatcacttcgtcaacaactcaaccagatatcgaaggaggagctctgttgcagctcagagattcgcttaatgattcgagcaatcgtctaaaatggacacgcgattttgtgagcccttgctatagttggtcttatgttacctgcagaggccagagtgttgtggctctaaatcttgcctcgagtggattcacaggaacactctctccagctattacaaaactgaagttcttggttaccttagagttacagaacaatagtttatctggtgccttaccagattctcttgggaacatggttaatctacagactttaaacctatcagtgaatagtttcagcggatcgataccagcgagctggagtcagctctcgaatctaaagcacttggatctctcatccaataatttaacaggaagcatcccaacacaattcttctcaatcccaacattcgatttttcaggaactcagcttatatgcggtaaaagtttgaatcagccttgttcttcaagttctcgtcttccagtcacatcctccaagaaaaagctgagagacattactttgactgcaagttgtgttgcttctataatcttattccttggagcaatggttatgtatcatcaccatcgcgtccgcagaaccaaatacgacatcttttttgatgtagctggggaagatgacaggaagatttcctttggacaactaaaacgattctctttacgtgaaatccagctcgcaacagatagtttcaacgagagcaatttgataggacaaggaggatttggtaaagtatacagaggtttgcttccagacaaaacaaaagttgcagtgaaacgccttgcggattacttcagtcctggaggagaagctgctttccaaagagagattcagctcataagcgttgcggttcataaaaatctcttacgccttattggcttctgcacaacttcctctgagagaatccttgtttatccatacatggaaaatcttagtgttgcatatcgactaagagatttgaaagcgggagaggaaggattagactggccaacaaggaagcgtgtagcttttggttcagctcacggtttagagtatctacacgaacattgtaacccgaagatcatacaccgcgatctcaaggctgcaaacatacttttagacaacaattttgagccagttcttggagatttcggtttagctaagcttgtggacacatctctgactcatgtcacaactcaagtccgaggcacaatgggtcacattgcgccagagtatctctgcacaggaaaatcatctgaaaaaaccgatgtttttggttacggtataacgcttcttgagcttgttactggtcagcgcgcaatcgatttttcacgcttggaagaagaggaaaatattctcttgcttgatcatataaagaagttgcttagagaacagagacttagagacattgttgatagcaatttgactacatatgactccaaagaagttgaaacaatcgttcaagtggctcttctctgcacacaaggctcaccagaagatagaccagcgatgtctgaagtggtcaaaatgcttcaagggactggtggtttggctgagaaatggactgaatgggaacaacttgaagaagttaggaacaaagaagcattgttgcttccgactttaccggctacttgggatgaagaagaaaccaccgttgatcaagaatctatccgattatcgacagcaagatga

SEQ ID NO: 196 - protein, 614 aa, Arabidopsis thaliana
MAHSGNGESFHDPLRGFIQRNCFRWNNQKLILQCFMALAFVGITSSTTQPDIEGGALLQLRDSLNDSSNRLKWTRDFVSPCYSWSYVTCRGQSVVALNLASSGFTGTLSPAITKLKFLVTLELQNNSLSGALPDSLGNMVNLQTLNLSVNSFSGSIPASWSQLSNLKHLDLSSNNLTGSIPTQFFSIPTFDFSGTQLICGKSLNQPCSSSSRLPVTSSKKKLRDITLTASCVASIILFLGAMVMYHHHRVRRTKYDIFFDVAGEDDRKISFGQLKRFSLREIQLATDSFNESNLIGQGGFGKVYRGLLPDKTKVAVKRLADYFSPGGEAAFQREIQLISVAVHKNLLRLIGFCTTSSERILVYPYMENLSVAYRLRDLKAGEEGLDWPTRKRVAFGSAHGLEYLHEHCNPKIIHRDLKAANILLDNNFEPVLGDFGLAKLVDTSLTHVTTQVRGTMGHIAPEYLCTGKSSEKTDVFGYGITLLELVTGQRAIDFSRLEEEENILLLDHIKKLLREQRLRDIVDSNLTTYDSKEVETIVQVALLCTQGSPEDRPAMSEVVKMLQGTGGLAEKWTEWEQLEEVRNKEALLLPTLPATWDEEETTVDQESIRLSTAR

SEQ ID NO: 197 - DNA, 1911 bp, Arabidopsis thaliana
  CDS (1)..(1911)
atgttgcaaggaagaagagaagcaaaaaagagttatgctttgttctcttcaactttcttcttcttctttatctgttttctttcttcttcttctgcagaactcacagacaaaggtgttaactttgaagttgttgccttaataggaatcaaaagctcactgactgatcctcatggagttctaatgaattgggatgacacagcagttgatccatgtagctggaacatgatcacttgttctgatggttttgtcataaggctagaagctccaagccaaaacttatcaggaactctttcatcaagtattggaaatttaacaaatcttcaaactgtgttattgcagaacaattacataacaggaaacatccctcatgagattgggaaattgatgaaactcaaaacacttgatctctctaccaataacttcactggtcaaatcccattcactctttcttactccaaaaatcttcagtacttcaggagggttaataataacagcctgacaggaacaattcctagctcattggcaaacatgacccaactcacttttttggatttgtcgtataataacttgagtggaccagttccaagatcacttgccaaaacattcaatgttatgggcaattctcagatttgtccaacaggaactgagaaagactgtaatgggactcagcctaagccaatgtcaatcaccttgaacagttctcaaaataaatcatctgatggaggaactaaaaaccggaaaatcgcggtagtcttcggtgtaagcttgacatgtgtttgcttgttgatcattggctttggttttcttctttggtggagaagaagacataacaaacaagtattattctttgacattaatgagcaaaacaaggaagaaatgtgtctagggaatctaaggaggtttaatttcaaagaacttcaatccgcaactagtaacttcagcagcaagaatctggtcggaaaaggagggtttggaaatgtgtataaaggttgtcttcatgatggaagtatcatcgcggtgaagagattaaaggatataaacaatggtggtggagaggttcagtttcagacagagcttgaaatgataagccttgccgtccaccggaatctcctccgcttatacggtttctgtactacttcctctgaacggcttctcgtttatccttacatgtccaatggcagtgtcgcttctcgtctcaaagctaaaccggtattggattggggcacaagaaagcgaatagcattaggagcaggaagagggttgctgtatttgcatgagcaatgtgatccaaagatcattcaccgtgatgtcaaagctgcgaacatacttcttgacgattactttgaagctgttgtcggagatttcgggttggctaagcttttggatcatgaggagtcgcatgtgacaaccgccgtgagaggaacagtgggtcacattgcacctgagtatctctcaacaggacaatcttctgagaagacagatgtgttcggtttcgggattcttcttctcgaattgattactggattgagagctcttgaattcggaaaagcagcaaaccaaagaggagcgatacttgattgggtaaagaaactacaacaagagaagaagctagaacagatagtagacaaggatttgaagagcaactacgatagaatagaagtggaagaaatggttcaagtggctttgctttgtacacagtatcttcccattcaccgtcctaagatgtctgaagttgtgagaatgcttgaaggcgatggtcttgttgagaaatgggaagcttcttctcagagagcagaaaccaatagaagttacagtaaacctaacgagttttcttcctctgaacgttattcggatcttacagatgattcctcggtgctggttcaagccatggagttatcaggtccaagatga

SEQ ID NO: 198 - protein, 636 aa, Arabidopsis thaliana
MLQGRREAKKSYALFSSTFFFFFICFLSSSSAELTDKGVNFEVVALIGIKSSLTDPHGVLMNWDDTAVDPCSWNMITCSDGFVIRLEAPSQNLSGTLSSSIGNLTNLQTVLLQNNYITGNIPHEIGKLMKLKTLDLSTNNFTGQIPFTLSYSKNLQYFRRVNNNSLTGTIPSSLANMTQLTFLDLSYNNLSGPVPRSLAKTFNVMGNSQICPTGTEKDCNGTQPKPMSITLNSSQNKSSDGGTKNRKIAVVFGVSLTCVCLLIIGFGFLLWWRRRHNKQVLFFDINEQNKEEMCLGNLRRFNFKELQSATSNFSSKNLVGKGGFGNVYKGCLHDGSIIAVKRLKDINNGGGEVQFQTELEMISLAVHRNLLRLYGFCTTSSERLLVYPYMSNGSVASRLKAKPVLDWGTRKRIALGAGRGLLYLHEQCDPKIIHRDVKAANILLDDYFEAVVGDFGLAKLLDHEESHVTTAVRGTVGHIAPEYLSTGQSSEKTDVFGFGILLLELITGLRALEFGKAANQRGAILDWVKKLQQEKKLEQIVDKDLKSNYDRIEVEEMVQVALLCTQYLPIHRPKMSEVVRMLEGDGLVEKWEASSQRAETNRSYSKPNEFSSSERYSDLTDDSSVLVQAMELSGPR

SEQ ID NO: 199 - DNA, 1824 bp, Oryza sativa (japonica cultivar-group)
  CDS (1)..(1824)
atgagggagctgcgcgtcgccgtcctcatcatcgcggtctcgctgccgtccttctccgcgtccgaccgccaaggagatgccttatatgatatgaaacaaaaactgaatgttactggcaatcagctttcggattggaaccaaaatcaagtcaacccttgtacatggaattctgtaatttgtgacaataacaacaatgttattcaagtaacattggctgctcgtggatttgctggagttttgtcaccaagaattggagaactgaaatatttgactgtcctgtccttggctggtaataggatttccggtggcataccagagcaatttggtaatctttctagtttgacaagcttagatttagaagacaaccttttggtgggagaaataccagcttctcttggccagctttctaagctccagttgttgatacttagtgataataatttcaatggatcaattcctgacagtctagcaaaaatctcaagcttgactgacatccggctggcgtacaataatctgtctggtcagatacctggtccgttattccaagtagcacgttacaacttttctggtaatcacttaaattgtggaaccaacttcccccactcttgctcaaccaacatgtcctaccagagtggatcccatagctcaaaaattggcatagtacttggaacagttggaggagtaataggacttctcattgtagctgctctctttctgttctgtaaagggaggaggaaaagccatctgcgggaagtttttgtggatgtagcaggtgaggatgatcgacgaattgcatttggccagctcaagagatttgcatggcgagaactacaaatcgcgacggataatttcagtgaaagaaatgttctcgggcagggaggttttggtaaagtttacaaaggtgttcttccagatggtactaagattgctgtaaaacgattgactgattatgaaagtcctggtggtgaggccgccttcttgcgtgaggtggagctgattagtgttgcagttcaccgcaatcttctaaaattgattggcttctgcacaacacaaacagagcgcctcctggtatatccattcatgcagaatttgagtgttgcctaccgattgcgagattttaagcctggagaacctgtcttaaactggccagaaagaaaacgggtggccattggtacagcacgtggactagaatatctgcatgaacactgcaacccaaagatcatacaccgtgatgtcaaagcggcgaatgtcttgcttgatgaggactttgaacctgttgttggtgattttggactagcgaagctagtggatgtgcagaagacatctgtcactactcaagtccgtggaacaatgggtcacatagcacctgaatatctatccacagggaagtcatcagagagaactgatgtttttggctacgggatcatgcttcttgagcttgtgactggccagcgtgccattgacttctcacgcttggaggaagaggacgatgttctattgctcgatcatgtaaagaagctacaaagagaagggcagctaggatccattgtggaccgcaacctgaaccagaattatgacgacgaggaagttgagatgatgatacagatagcattgctgtgcacacagtcatcgcccgaggatcggccatccatgtcagaggtggttcggatgctagaaggcgaggggctggcggagcggtgggaggagtggcagcaggtggaggtgacaaggaggcaggagtacgagcggatgcagcggcggttcgactggggagaggactctgtctacaaccaggaagcaatagagttgtctggaggtagatga

SEQ ID NO: 200 - protein, 607 aa, Oryza sativa (japonica cultivar-group)
MRELRVAVLIIAVSLPSFSASDRQGDALYDMKQKLNVTGNQLSDWNQNQVNPCTWNSVICDNNNNVIQVTLAARGFAGVLSPRIGELKYLTVLSLAGNRISGGIPEQFGNLSSLTSLDLEDNLLVGEIPASLGQLSKLQLLILSDNNFNGSIPDSLAKISSLTDIRLAYNNLSGQIPGPLFQVARYNFSGNHLNCGTNFPHSCSTNMSYQSGSHSSKIGIVLGTVGGVIGLLIVAALFLFCKGRRKSHLREVFVDVAGEDDRRIAFGQLKRFAWRELQIATDNFSERNVLGQGGFGKVYKGVLPDGTKIAVKRLTDYESPGGEAAFLREVELISVAVHRNLLKLIGFCTTQTERLLVYPFMQNLSVAYRLRDFKPGEPVLNWPERKRVAIGTARGLEYLHEHCNPKIIHRDVKAANVLLDEDFEPVVGDFGLAKLVDVQKTSVTTQVRGTMGHIAPEYLSTGKSSERTDVFGYGIMLLELVTGQRAIDFSRLEEEDDVLLLDHVKKLQREGQLGSIVDRNLNQNYDDEEVEMMIQIALLCTQSSPEDRPSMSEVVRMLEGEGLAERWEEWQQVEVTRRQEYERMQRRFDWGEDSVYNQEAIELSGGR

SEQ ID NO: 201 - DNA, 1818 bp, Oryza sativa (japonica cultivar-group)
  CDS (1)..(1818)
atggatctgctcagcgtcctcctaattatagcatctctgctcccattttcagcatctgaccgtcaaggtgatgcactatatgatatgaagctgaagctgaatgctactggtaaccagctttctgactggaaccaaaatcaagttaacccatgcacttggaattctgttatttgtgacaacaactacaatgttgtgcaagtaacattggcatctatgggattcactggagttctatcaccacgaattggagagcttcagtttttgaatgttttgtccttgcctggtaataagattactggtggcatacctgagcagatcggcaacctatctagtttgacaagtttggatttggaagacaatttgttggttggaccaataccggcttctcttggccagctttcaaagctccaaattctgatactaagtcaaaacaatctcaacggaactatacctgatactgtagcaagaatctcaagcttgacagacattaggttagcctacaataaactctctggttcaatacctggttcgctgtttcaagttgcacgttacaacttttctggtaataacttgacttgtggagcaaactttctgcatccatgctcatcaagtatttcttatcaaggttcatcccatggctcaaaggtaggcattgtactcggaacagttgtaggagcaatagggatacttataataggggctgtgtttattgtctgtaatggaaggaggaaaagccatctacgagaagtttttgtcgatgtatcaggcgaggacgatcgaagaattgcatttggtcagttgaaaagatttgcctggcgagaattacaacttgcaaccgatagtttcagtgagaaaaatgtccttggacaggggggtttcggtaaagtgtataaaggagcacttccagatggcactaagattgctgtaaagcggttgacagattatgaaagccctggtggggaggctgcattcttgcgtgaagtagagcttatcagtgttgcagttcaccggaatcttttaagattgattggcttctgtacaacacaaacagaacgtctacttgtttatcctttcatgcagaatcttagtgtggcctatcgtttacgagaattcaaacctggcgaaccaatattggattggtcagcaaggaaacgtgtggcaataggcacagcacgtggactggagtacctgcacgagcactgtaatcccaagatcatacatcgagatgtcaaggctgccaacgtcctgcttgatgaggattttgagccagttgttggtgactttggcctggcaaagttggttgatgtacagaagacatcagtgacaactcaagtccgtggaactatgggtcacattgcgcctgaatatctgtccacagggaagtcatcggagagaactgatgtttttggttatggcataatgcttcttgagctggtcactggacaacgcgccatcgacttctcacggttggaggaagaagacgatgtgctactgcttgaccatgtgaagaagctgcagagggaagggcagctgggcgccatcgtggaccggaacctgagcagcaactacgacgggcaggaggtggagatgatgatacagatcgcgctgctgtgcacacaggcgtcgccggaggaccggccgtccatgtcggaggtggtgcggatgctggaaggggaaggactcgcggagcggtgggaggagtggcagcaggtggaggtgacgcggcggcaggactacgagcggatgcagcagcgcttcgactggggcgaggactccatcttcaaccaggaagccatcgagctctccgccggcagatga

SEQ ID NO: 202 - protein, 605 aa, Oryza sativa (japonica cultivar-group)
MDLLSVLLIIASLLPFSASDRQGDALYDMKLKLNATGNQLSDWNQNQVNPCTWNSVICDNNYNVVQVTLASMGFTGVLSPRIGELQFLNVLSLPGNKITGGIPEQIGNLSSLTSLDLEDNLLVGPIPASLGQLSKLQILILSQNNLNGTIPDTVARISSLTDIRLAYNKLSGSIPGSLFQVARYNFSGNNLTCGANFLHPCSSSISYQGSSHGSKVGIVLGTVVGAIGILIIGAVFIVCNGRRKSHLREVFVDVSGEDDRRIAFGQLKRFAWRELQLATDSFSEKNVLGQGGFGKVYKGALPDGTKIAVKRLTDYESPGGEAAFLREVELISVAVHRNLLRLIGFCTTQTERLLVYPFMQNLSVAYRLREFKPGEPILDWSARKRVAIGTARGLEYLHEHCNPKIIHRDVKAANVLLDEDFEPVVGDFGLAKLVDVQKTSVTTQVRGTMGHIAPEYLSTGKSSERTDVFGYGIMLLELVTGQRAIDFSRLEEEDDVLLLDHVKKLQREGQLGAIVDRNLSSNYDGQEVEMMIQIALLCTQASPEDRPSMSEVVRMLEGEGLAERWEEWQQVEVTRRQDYERMQQRFDWGEDSIFNQEAIELSAGR

SEQ ID NO: 203 - DNA, 1887 bp, Oryza sativa (japonica cultivar-group)
  CDS (1)..(1887)
atggcggaggcgcggctgctgcggcggcggcggctgtgcttggcggtgccgttcgtgtgggtggtggcggtggccgtgagccgggtcggcgccaacacggagggtgatgccctatatagtctgcgccaaagtctgaaagatgctaacaatgtgctgcagagttgggatcccactctggtcaatccatgcacatggttccatgtaacttgtaaccctgacaacagcgtgatcagagttgatcttggaaatgcacaactgtcaggtgcattggttccccagcttgggcagttgaaaaatctgcaatatctggagctttacagcaacaacataagtgggacaatacctaatgaactgggaaacttaactaacttggtcagtttggatctttacctgaacaacttcactggttttattccggaaaccttggggcaactctacaagctgcgtttccttcgtcttaacaacaacagtctttctggttcaattccaaaatccttgaccaatatcactactcttcaagttctggatctctcaaataacaatctctcaggagaggttccgtctactggctccttttcactctttacccctataagttttgctaataataaagatctttgtggcccgggtactacaaaaccctgccctggagctccacctttttctccaccacctcctttcaatcccccaacacctactgtgtcacaaggtgactccaaaactggagcaattgctggaggtgttgctgcagctgctgcattgctgtttgcggttccggcaattggatttgcatggtggcggcggcgtaaacctgaagaacacttctttgatgtccctgctgaggaggatccggaagtgcaccttggccaacttaagagattctcactccgggagcttcaagttgctactgataactttagcaataagaatattctgggaagaggtggctttggaaaggtgtacaaaggtagactggcagatggctcgttggtagcagtgaaaagattaaaagaagaacgtacccctggtggtgagctccagttccaaacagaagttgaaatgattagcatggcggtgcataggaacctgcttcggctccgtggattttgcatgacgcctacagaacggttacttgtctatccctacatggctaatgggagtgtcgcatcacgattgcgagagcggcagccaaatgatccgccgcttgaatggcaaacaagaactcggattgcgctgggatctgccagaggattgtcctacttgcacgaccattgtgatcccaagatcattcatcgtgatgtcaaagctgcaaatattctgttggatgaagattttgaggcagtcgtgggtgactttggactggccaaacttatggattacaaggacactcatgtaaccacagctgttcgtgggacgatcggacacattgctcctgagtacctctctactgggaagtcctctgagaagactgatgtttttggctatggaatcatgcttcttgagctcattacaggacaaagggcatttgatcttgctcgtcttgcaaacgatgatgatgtgatgttgctcgattgggtgaaagggctcctgaaagagaagaaggtggagatgctggtggacccggacctccagagcggcttcgtggagcatgaggtggagtcactcatccaggtggctctgctctgcacgcagggctccccgatggaccggcccaagatgtcggaggtggtgaggatgctggagggcgatggcctcgcggagcggtgggaggagtggcagaaggtggaggtggtccggcaggaggcggagctggccccccgccacaacgactggatcgtcgactcgacctacaatctccgggcaatggagctgtccggcccgaggtaa

SEQ ID NO: 204 - protein, 628 aa, Oryza sativa (japonica cultivar-group)
MAEARLLRRRRLCLAVPFVWVVAVAVSRVGANTEGDALYSLRQSLKDANNVLQSWDPTLVNPCTWFHVTCNPDNSVIRVDLGNAQLSGALVPQLGQLKNLQYLELYSNNISGTIPNELGNLTNLVSLDLYLNNFTGFIPETLGQLYKLRFLRLNNNSLSGSIPKSLTNITTLQVLDLSNNNLSGEVPSTGSFSLFTPISFANNKDLCGPGTTKPCPGAPPFSPPPPFNPPTPTVSQGDSKTGAIAGGVAAAAALLFAVPAIGFAWWRRRKPEEHFFDVPAEEDPEVHLGQLKRFSLRELQVATDNFSNKNILGRGGFGKVYKGRLADGSLVAVKRLKEERTPGGELQFQTEVEMISMAVHRNLLRLRGFCMTPTERLLVYPYMANGSVASRLRERQPNDPPLEWQTRTRIALGSARGLSYLHDHCDPKIIHRDVKAANILLDEDFEAVVGDFGLAKLMDYKDTHVTTAVRGTIGHIAPEYLSTGKSSEKTDVFGYGIMLLELITGQRAFDLARLANDDDVMLLDWVKGLLKEKKVEMLVDPDLQSGFVEHEVESLIQVALLCTQGSPMDRPKMSEVVRMLEGDGLAERWEEWQKVEVVRQEAELAPRHNDWIVDSTYNLRAMELSGPR

SEQ ID NO: 205 - DNA, 1875 bp, Oryza sativa (japonica cultivar-group)
  CDS (1)..(1875)
atggcggcgcatcggtgggcggtgtgggcggtgctgctgctgcggctgctcgtgccggcggcgcgggtgctcgccaacatggaaggtgatgcattgcatagcttgaggactaatttagttgatcctaataatgttctacaaagttgggacccaactctggtcaatccgtgcacttggtttcatgttacttgcaataacgacaacagtgttatcagagttgatcttgggaatgctgcactatcaggcactttggtcccacaacttgggcaactaaaaaacttgcaatacctggagctctacagtaataacataagcggaacgatacctagtgaacttggaaacctcacaaacttggtcagtttggatttgtacttgaacaacttcactggtccaataccagattcacttggaaacctattgaagctacgattcctgcgtcttaacaataacagcctttcgggttcaattcctaaatcactaactgctatcactgccctacaagttctagatctttcaaacaacaatttgtctggagaagttccatcaactggttccttttcattattcacccctatcagttttgccaacaacccttccttgtgtggtcctgggaccacaaaaccttgccctggtgctccccccttttccccacctcctccatataatcctccaactcctgtgcagtcaccagggagttcatctagtactggagcaattgctggtggagtggctgctggagcagccttgctatttgctattcctgctattggttttgcatggtatcggcgcaggaaaccccaagagcatttctttgatgtgcctgctgaggaggatccagaggtccatcttggccagcttaaaagattttcactacgagaactacaagttgcaacagataccttcagcaataaaaacattctcggaagaggtgggtttggcaaggtctataaaggaagattagcagatggttctttagtagctgttaagagactaaaggaggagagaacacctggtggggaactacagtttcaaacagaagttgagatgattagcatggctgtacatagaaatctgctgcgtttacgagggttctgtatgacacccacagaaaggttgcttgtgtatccatacatggctaatggaagcgttgcgtcacgtcttagagaacggccaccatcggaacctccacttgattggcgaacaagaagaaggattgcgttgggttccgccagggggctgtcctatttacatgatcattgtgacccaaagattatccatcgtgatgtcaaagctgcaaatattttattagatgaagactttgaagctgtagtaggggactttggtttggccaaactaatggattacaaggatacccatgtaacaactgcagttcgtggaacaattgggcatattgcaccagaatatctttcaacaggaaaatcatctgagaaaactgatgtatttggttatgggattatgcttttggagcttataacaggacaacgtgcctttgaccttgctcgtctagccaatgatgatgatgtcatgctactggactgggtaaaaggattactcaaggagaaaaggctggagatgttggttgatccagatttacagagcaactacattgatgttgaggtagaatcactaatccaggttgctcttctttgcacacaaggctcccccacagaacgccccaagatggcggaggttgtgaggatgcttgaaggtgatggccttgccgagagatgggaggagtggcagaagatagaagtagtacggcaggaggtagagcttggccctcatcggaactcagagtggattgtcgactcgacggacaaccttcatgcggttgagctatcagggccgaggtga

SEQ ID NO: 206 - protein, 624 aa, Oryza sativa (japonica cultivar-group)
MAAHRWAVWAVLLLRLLVPAARVLANMEGDALHSLRTNLVDPNNVLQSWDPTLVNPCTWFHVTCNNDNSVIRVDLGNAALSGTLVPQLGQLKNLQYLELYSNNISGTIPSELGNLTNLVSLDLYLNNFTGPIPDSLGNLLKLRFLRLNNNSLSGSIPKSLTAITALQVLDLSNNNLSGEVPSTGSFSLFTPISFANNPSLCGPGTTKPCPGAPPFSPPPPYNPPTPVQSPGSSSSTGAIAGGVAAGAALLFAIPAIGFAWYRRRKPQEHFFDVPAEEDPEVHLGQLKRFSLRELQVATDTFSNKNILGRGGFGKVYKGRLADGSLVAVKRLKEERTPGGELQFQTEVEMISMAVHRNLLRLRGFCMTPTERLLVYPYMANGSVASRLRERPPSEPPLDWRTRRRIALGSARGLSYLHDHCDPKIIHRDVKAANILLDEDFEAVVGDFGLAKLMDYKDTHVTTAVRGTIGHIAPEYLSTGKSSEKTDVFGYGIMLLELITGQRAFDLARLANDDDVMLLDWVKGLLKEKRLEMLVDPDLQSNYIDVEVESLIQVALLCTQGSPTERPKMAEVVRMLEGDGLAERWEEWQKIEVVRQEVELGPHRNSEWIVDSTDNLHAVELSGPR

SEQ ID NO: 207 - DNA, 1887 bp, Oryza sativa (japonica cultivar-group)
  CDS (1)..(1887)
atgaggatgcggtggtgggcggcgccgctcgccgccgtgctcgccgtgatcctgctgccgtcgtccaccgccacgctctctcccgccggcatcaactacgaagtggtggcgctgatggccatcaagacggagctgcaagacccctacaacgtgcttgacaactgggacatcaactccgtcgatccctgcagctggaggatggtcacctgctccgccgacggctacgtctccgcgctaggtctgcccagccaaagcttgtcaggcaaattatcccccggaattgggaacctcaccaggctgcaatctgtgctattacagaacaatgcaatatctggcactattcctgccagcataggcaggttggggatgctgcagacgcttgacatgtcagacaatcagattactgggagtatcccgagttcaattggcgatctcaagaacctcaactatctgaagttgaacaacaacagcttatctggagttctacctgattcattagccgccatcaatggccttgctctagtagatctttcattcaataatttgagcggtccattgccaaagatttcttcaagaactttcaacattgtgggaaatccaatgatctgtggtgtcaagtctggagataattgctcttctgtatcgatggatccactttcataccctccagatgatcttaagactcagccacaacaaggcatcgcaagaagccaccgtatagctattatctgtggagtcactgttggttcggtagcatttgcaactatcatagtcagtatgcttctttggtggcggcataggcgcaatcagcagatcttttttgatgtaaatgatcaatatgacccagaagtatgtttgggtcatcttaagcgttatgcctttaaggagcttcgagcagctaccaataatttcaactcaaagaatattttaggtgaaggcgggtatggaatagtatacaaaggttttctacgtgatggtgcaattgttgctgtcaaaagattgaaggactataatgctgttggtggggaggttcagttccaaactgaagttgaagtcataagcttggctgttcatcggaatctccttagactcattggattctgcaccacagagaacgaaagattacttgtttatccttatatgccaaatggaagtgttgcttctcagttgcgggaacttgtaaatggcaagccagctctagattggtcaaggagaaagaggatagcactaggcacagcacgagggttgctttatttgcatgaacagtgtgatccaaaaataattcaccgtgatgtaaaagcctccaatgtgcttcttgatgaatacttcgaagcaattgtgggagatttcggattggcgaaacttttggatcatagggagtctcatgttaccactgcagtacgtgggacagtagggcacatagctccagagtatttgtcaactgggcagtcatcggagaagacggatgtttttgggtttggagttttgttggttgagttgatcactggtcagaaggcattggactttggaaggctagcgaatcagaaaggaggagtgcttgattgggtaaagaagcttcatcaggaaaagcagctgagcatgatggtggataaagacctgggtagcaactatgacagggtcgagctcgaggaaatggttcaggtggccttgctgtgcacacaatactacccatctcatcgtcccagaatgtcggaggtgatcagaatgctggaaggggacggtctcgcggagaaatgggaggcatcacagaacgtcgacacaccgaaatccgtttcgtcagagcttctacccccaaaattcatggattttgcggcagacgaatcctcccttggcttggaagccatggagctctctggaccgaggtga

SEQ ID NO: 208 - protein, 628 aa, Oryza sativa (japonica cultivar-group)
MRMRWWAAPLAAVLAVILLPSSTATLSPAGINYEVVALMAIKTELQDPYNVLDNWDINSVDPCSWRMVTCSADGYVSALGLPSQSLSGKLSPGIGNLTRLQSVLLQNNAISGTIPASIGRLGMLQTLDMSDNQITGSIPSSIGDLKNLNYLKLNNNSLSGVLPDSLAAINGLALVDLSFNNLSGPLPKISSRTFNIVGNPMICGVKSGDNCSSVSMDPLSYPPDDLKTQPQQGIARSHRIAIICGVTVGSVAFATIIVSMLLWWRHRRNQQIFFDVNDQYDPEVCLGHLKRYAFKELRAATNNFNSKNILGEGGYGIVYKGFLRDGAIVAVKRLKDYNAVGGEVQFQTEVEVISLAVHRNLLRLIGFCTTENERLLVYPYMPNGSVASQLRELVNGKPALDWSRRKRIALGTARGLLYLHEQCDPKIIHRDVKASNVLLDEYFEAIVGDFGLAKLLDHRESHVTTAVRGTVGHIAPEYLSTGQSSEKTDVFGFGVLLVELITGQKALDFGRLANQKGGVLDWVKKLHQEKQLSMMVDKDLGSNYDRVELEEMVQVALLCTQYYPSHRPRMSEVIRMLEGDGLAEKWEASQNVDTPKSVSSELLPPKFMDFAADESSLGLEAMELSGPR

SEQ ID NO: 209 - DNA, 1767 bp, Arabidopsis thaliana
  CDS (1)..(1767)
atggaaggtgtgagatttgtggtgtggagattaggatttctggtttttgtatggttctttgatatctcttctgctacactttctcctactggtgtaaactatgaagtgacagctttggttgctgtgaagaatgaattgaatgatccgtacaaagttcttgagaattgggatgtgaattcagttgatccttgtagctggagaatggtttcttgcactgatggctatgtctcttcactggtgttgcaaaacaatgcaatcactggtccaattccggaaacgattgggaggttggagaagcttcagtcacttgatctttcgaacaattcattcaccggggagataccggcctcacttggagaactcaagaacttgaattacttgcggttaaacaataacagtcttataggaacttgccctgagtctctatccaagattgagggactcactctagtggtaattggtaatgcgttaatctgtggcccaaaagctgtttcaaactgttctgctgttcccgagcctctcacgcttccacaagatggtccagatgaatcaggaactcgtaccaatggccatcacgttgctcttgcatttgccgcaagcttcagtgcagcattttttgttttctttacaagcggaatgtttctttggtggagatatcgccgtaacaagcaaatattttttgacgttaatgaacaatatgatccagaagtgagtttagggcacttgaagaggtatacattcaaagagcttagatctgccaccaatcatttcaactcgaagaacattctcggaagaggcggatacgggattgtgtacaaaggacacttaaacgatggaactttggtggctgtcaaacgtctcaaggactgtaacattgcgggtggagaagtccagtttcagacagaagtagagactataagtttggctcttcatcgcaatctcctccggctccgcggtttctgtagtagcaaccaggagagaattttagtctacccttacatgccaaatgggagtgtcgcatcacgcttaaaagataatatccgtggagagccagcattagactggtcgagaaggaagaagatagcggttgggacagcgagaggactagtttacctacacgagcaatgtgacccgaagattatacaccgcgatgtgaaagcagctaacattctgttagatgaggacttcgaagcagttgttggtgattttgggttagctaagcttctagaccatagagactctcatgtcacaactgcagtccgtggaactgttggccacattgcacctgagtacttatccacgggtcagtcctcagagaagactgatgtctttggctttggcatacttctccttgagctcattactggtcagaaagctcttgattttggcagatccgcacaccagaaaggtgtaatgcttgactgggtgaagaagctgcaccaagaagggaaactaaagcagttaatagacaaagatctaaatgacaagttcgatagagtagaactcgaagaaatcgttcaagttgcgctactctgcactcaattcaatccatctcatcgaccgaaaatgtcagaagttatgaagatgcttgaaggtgacggtttggctgagagatgggaagcgacgcagaacggtactggtgagcatcagccaccgccattgccaccggggatggtgagttcttcgccgcgtgtgaggtattactcggattatattcaggaatcgtctcttgtagtagaagccattgagctctcgggtcctcgatga

SEQ ID NO: 210 - protein, 588 aa, Arabidopsis thaliana
MEGVRFVVWRLGFLVFVWFFDISSATLSPTGVNYEVTALVAVKNELNDPYKVLENWDVNSVDPCSWRMVSCTDGYVSSLVLQNNAITGPIPETIGRLEKLQSLDLSNNSFTGEIPASLGELKNLNYLRLNNNSLIGTCPESLSKIEGLTLVVIGNALICGPKAVSNCSAVPEPLTLPQDGPDESGTRTNGHHVALAFAASFSAAFFVFFTSGMFLWWRYRRNKQIFFDVNEQYDPEVSLGHLKRYTFKELRSATNHFNSKNILGRGGYGIVYKGHLNDGTLVAVKRLKDCNIAGGEVQFQTEVETISLALHRNLLRLRGFCSSNQERILVYPYMPNGSVASRLKDNIRGEPALDWSRRKKIAVGTARGLVYLHEQCDPKIIHRDVKAANILLDEDFEAVVGDFGLAKLLDHRDSHVTTAVRGTVGHIAPEYLSTGQSSEKTDVFGFGILLLELITGQKALDFGRSAHQKGVMLDWVKKLHQEGKLKQLIDKDLNDKFDRVELEEIVQVALLCTQFNPSHRPKMSEVMKMLEGDGLAERWEATQNGTGEHQPPPLPPGMVSSSPRVRYYSDYIQESSLVVEAIELSGPR

SEQ ID NO: 211 - DNA, 1824 bp, Arabidopsis thaliana
  CDS (1)..(1824)
atggtggtgatgaagttaataacaatgaagatattctctgttctgttactactatgtttcttcgttacttgttctctctcttctgaacccagaaaccctgaagtcattaatggtgacaaattcttcatctttgttttgttttttcccaattccagaggagctccaagtcagtctctttcaggaactttatctgggtctattggaaatctcactaatcttcgacaagtgtcattacagaacaataacatctccggtaaaatcccaccggagatttgttctcttcccaaattacagactctggatttatccaataaccggttctccggtgaaatccccggttctgttaaccagctgagtaatctccaatatctgaggttgaacaacaactcattatctgggccctttcctgcttctctgtctcaaatccctcacctctctttcttagacttgtcttataacaatctcagaggtcctgttcctaaatttcctgcaaggacattcaatgttgctgggaaccctttgatttgtaaaaacagcctaccggagatttgttcaggatcaatcagtgcaagccctctttctgtctctttacgttcttcatcaggacgtagaaccaacatattagcagttgcacttggtgtaagccttggctttgctgttagtgtaatcctctctctcgggttcatttggtatcgaaagaaacaaagacggttaacgatgcttcgcattagtgacaagcaagaggaagggttacttgggttgggaaatctaagaagcttcacattcagggaacttcatgtagctacggatggttttagttccaagagtattcttggtgctggtgggtttggtaatgtctacagaggaaaattcggggatgggacagtggttgcagtgaaacgattgaaagatgtgaatggaacctccgggaactcacagtttcgtactgagcttgagatgatcagcttagctgttcataggaatttgcttcggttaatcggttattgtgcgagttctagcgaaagacttcttgtttacccttacatgtccaatggcagcgtcgcctctaggctcaaagctaagccagcgttggactggaacacaaggaagaagatagcgattggagctgcaagagggttgttttatctacacgagcaatgcgatcccaagattattcaccgagatgtcaaggcagcaaacattctcctagatgagtattttgaagcagttgttggggattttggactagcaaagctactcaaccacgaggattcacatgtcacaaccgcggttagaggaactgttggtcacattgcacctgagtatctctccaccggtcagtcatctgagaaaaccgatgtctttgggttcggtatacttttgctagagctcatcacaggaatgagagctctcgagtttggcaagtctgttagccagaaaggagctatgctagaatgggtgaggaagctacacaaggaaatgaaagtagaggagctagtagaccgagaactggggacaacctacgatagaatagaagttggagagatgctacaagtggcactgctctgcactcagtttcttccagctcacagacccaaaatgtctgaagtagttcagatgcttgaaggagatggattagctgagagatgggctgcttcacatgaccattcacatttctaccatgccaacatgtcttacaggactattacctctactgatggcaacaaccaaaccaaacatctgtttggctcctcaggatttgaagatgaagatgataatcaagcgttagattcattcgccatggaactatctggtccaaggtag

SEQ ID NO: 212 - protein, 607 aa, Arabidopsis thaliana
MVVMKLITMKIFSVLLLLCFFVTCSLSSEPRNPEVINGDKFFIFVLFFPNSRGAPSQSLSGTLSGSIGNLTNLRQVSLQNNNISGKIPPEICSLPKLQTLDLSNNRFSGEIPGSVNQLSNLQYLRLNNNSLSGPFPASLSQIPHLSFLDLSYNNLRGPVPKFPARTFNVAGNPLICKNSLPEICSGSISASPLSVSLRSSSGRRTNILAVALGVSLGFAVSVILSLGFIWYRKKQRRLTMLRISDKQEEGLLGLGNLRSFTFRELHVATDGFSSKSILGAGGFGNVYRGKFGDGTVVAVKRLKDVNGTSGNSQFRTELEMISLAVHRNLLRLIGYCASSSERLLVYPYMSNGSVASRLKAKPALDWNTRKKIAIGAARGLFYLHEQCDPKIIHRDVKAANILLDEYFEAVVGDFGLAKLLNHEDSHVTTAVRGTVGHIAPEYLSTGQSSEKTDVFGFGILLLELITGMRALEFGKSVSQKGAMLEWVRKLHKEMKVEELVDRELGTTYDRIEVGEMLQVALLCTQFLPAHRPKMSEVVQMLEGDGLAERWAASHDHSHFYHANMSYRTITSTDGNNQTKHLFGSSGFEDEDDNQALDSFAMELSGPR

SEQ ID NO: 213 - DNA, 1818 bp, Brassica rapa subsp
  CDS (1)..(1818)
atggctttgactttaaccgtgttgattctcgcctgcttattgtcattagtctcaccagacgctcaaggggatgcgttatttgcgctgaggatgtccttacgcgcattgcctaatcagcttagtgactggaaccagaaccaagtgaacccttgcacttggtctcaagtcatttgcgatgacaaaaactttgtcacttctcttacattgtcagacatgaacttctctggaactttgtcttcaagaataggaatcctcggaacactcaagactcttacgttgaaggggaatggaatagcgggtggaataccggaagagtttggaaacttgactagcttgactagtttggatttggaggataatgagctgagtgggtttataccgtccactcttggtaatctcaagaagcttcagttcttgacgttgagtaggaataatcttaatgggactatccctgtgtcactcactggtcttccaaacctgataaatcttctgcttgattccaatcgtctcagtggccagattcctcaaactctatttgagatcccaaaatacaatttcacaggaaacaacttgaattgtggtgttggtcaacctcacccttgtgtatctgaggttgcccgttcaggtgattcaagcaagccaaaaactggcattattgcaggagttgttgctggagttacagtcatcctctttggaatcttggtgtttttgttctgcagggataggcataaaggttacaaacgtgacgtgttcgttgatgttgcaggtgaagtggacaggagaatagcatttggacagctaaaaagatttgcatggagagagctccaactagccacagacaacttcagcgaaaagaacgtgctcggccaaggcggcttcgggaaagtctacaaaggagtgcttccagacaacaccaaagtcgctgtcaaaagactcacagacttcgaatctcccggtggagacgctgctttccagcgagaagtcgagatgataagcgtagccgtccacaagaacctcctccgcctcataggtttctgcaccactcaaacggaacgcctcttggtttaccccttcatgcagaacctcagcctcgcgcaccgtctcagagagatcaaggcgggggacccggttcttgactgggagactaggaaacgcattgcgttaggagcggcgcgtgggtttgagtatcttcacgagcattgcaaccctaagatcatacatagagacgtgaaggcagctaacgtgttgctggatgaggattttgaagctgtggttggtgattttgggttggctaagttggttgatgttaggaggactaatgtgactactcaggttagaggaacaatgggtcacattgcaccggagtatttatctacagggaagtcgtctgagaggaccgatgttttcgggtatgggatcatgcttcttgagcttgttacaggacaaagagctatagatttttcgcgtttggaggaagaagatgatgtcttgttgcttgaccacgtgaagaagctggaaagggagaagaggttgggagctattgtggataagaatttggatggagattatgtgaaagaagaagtggagatgatgatacaagtggctttgctttgtacgcaaggctcaccggaagatagaccggtgatgtctgaagttgtgaggatgctggaaggagaagggcttgcggagaggtgggaagagtggcaaaacgtggaggtcacgagacgtcacgagttcgagaggatgcagaggaggtttgattggggtgaggattctatgaataaccaagatgctattgaactatcaggtgggagatga

SEQ ID NO: 214 - protein, 605 aa, Brassica rapa subsp
MALTLTVLILACLLSLVSPDAQGDALFALRMSLRALPNQLSDWNQNQVNPCTWSQVICDDKNFVTSLTLSDMNFSGTLSSRIGILGTLKTLTLKGNGIAGGIPEEFGNLTSLTSLDLEDNELSGFIPSTLGNLKKLQFLTLSRNNLNGTIPVSLTGLPNLINLLLDSNRLSGQIPQTLFEIPKYNFTGNNLNCGVGQPHPCVSEVARSGDSSKPKTGIIAGVVAGVTVILFGILVFLFCRDRHKGYKRDVFVDVAGEVDRRIAFGQLKRFAWRELQLATDNFSEKNVLGQGGFGKVYKGVLPDNTKVAVKRLTDFESPGGDAAFQREVEMISVAVHKNLLRLIGFCTTQTERLLVYPFMQNLSLAHRLREIKAGDPVLDWETRKRIALGAARGFEYLHEHCNPKIIHRDVKAANVLLDEDFEAVVGDFGLAKLVDVRRTNVTTQVRGTMGHIAPEYLSTGKSSERTDVFGYGIMLLELVTGQRAIDFSRLEEEDDVLLLDHVKKLEREKRLGAIVDKNLDGDYVKEEVEMMIQVALLCTQGSPEDRPVMSEVVRMLEGEGLAERWEEWQNVEVTRRHEFERMQRRFDWGEDSMNNQDAIELSGGR

SEQ ID NO: 215 - DNA, 1887 bp, Oryza sativa
  CDS (1)..(1887)
atggcggaggcgcggctgctgcggcggcggcggctgtgcttggcggtggcggtcgtgtgggtggtggcggtggccgtgagccgggtcggcgccaacacggagggtgatgccctatatagtctgcgccaaagtctgaaagatgctaacaatgtgctgcagagttgggatcccactctggtcaatccatgcacatggttccatgtaacttgtaaccctgacaacagcgtgatcagagttgatcttggaaatgcacaactgtcaggtgcattggttccccagcttgggcagttgaaaaatctgcaatatctggagctttacagcaacaacataagtgggacaatacctaatgaactgggaaacttaactaacttggtcagtttggatctttacctgaacaacttcactggttttattccggaaaccttggggcaactctacaagctgcgtttccttcgtcttaacaacaacagtctttctggttcaattccaaaatccttgaccaatatcactactcttcaagttctggatctctcaaataacaatctctcaggagaggttccgtctactggctccttttcactctttacccctataagttttgctaataataaagatctttgtggcccgggtactacaaaaccctgccctggagctccacctttttctccaccacctcctttcaatcccccaacacctactgtgtcacaaggtgactccaaaactggagcaattgctggaggtgttgctgcagctgctgcattgctgtttgcggttccggcaattggatttgcatggtggcggcggcgtaaacctgaagaacacttctttgatgtccctgctgaggaggatccggaagtgcaccttggccaacttaagagattctcactccgggagcttcaagttgctactgataactttagcaataagaatattctgggaagaggtggctttggaaaggtgtacaaaggtagactggcagatggctcgttggtagcagtgaaaagattaaaagaagaacgtacccctggtggtgagctccagttccaaacagaagttgaaatgattagcatggcggtgcataggaacctgcttcggctccgtggattttgcatgacgcctacagaacggttacttgtctatccctacatggctaatgggagtgtcgcatcacgattgcgagagcggcagccaaatgatccgccgcttgaatggcaaacaagaactcggattgcgctgggatctgccagaggattgtcctacttgcacgaccattgtgatcccaagatcattcatcgtgatgtcaaagctgcaaatattctgttggatgaagattttgaggcagtcgtgggtgactttggactggccaaacttatggattacaaggacactcatgtaaccacagctgttcgtgggacgatcggacacattgctcctgagtacctctctactgggaagtcctctgagaagactgatgtttttggctatggaatcatgcttcttgagctcattacaggacaaagggcatttgatcttgctcgtcttgcaaacgatgatgatgtgatgttgctcgattgggtgaaagggctcctgaaagagaagaaggtggagatgctggtggacccggacctccagagcggcttcgtggagcatgaggtggagtcactcatccaggtggctctgctctgcacgcagggctccccgatggaccggcccaagatgtcggaggtggtgaggatgctggagggcgatggcctcgcggagcggtgggaggagtggcaaaaggtggaggtggtccggcaggaggcggagctggccccccgccacaacgactggatcgtcgactcgacctacaatctccgggcaatggagctgtccggcccgaggtaa

SEQ ID NO: 216 - protein, 628 aa, Oryza sativa
MAEARLLRRRRLCLAVAVVWVVAVAVSRVGANTEGDALYSLRQSLKDANNVLQSWDPTLVNPCTWFHVTCNPDNSVIRVDLGNAQLSGALVPQLGQLKNLQYLELYSNNISGTIPNELGNLTNLVSLDLYLNNFTGFIPETLGQLYKLRFLRLNNNSLSGSIPKSLTNITTLQVLDLSNNNLSGEVPSTGSFSLFTPISFANNKDLCGPGTTKPCPGAPPFSPPPPFNPPTPTVSQGDSKTGAIAGGVAAAAALLFAVPAIGFAWWRRRKPEEHFFDVPAEEDPEVHLGQLKRFSLRELQVATDNFSNKNILGRGGFGKVYKGRLADGSLVAVKRLKEERTPGGELQFQTEVEMISMAVHRNLLRLRGFCMTPTERLLVYPYMANGSVASRLRERQPNDPPLEWQTRTRIALGSARGLSYLHDHCDPKIIHRDVKAANILLDEDFEAVVGDFGLAKLMDYKDTHVTTAVRGTIGHIAPEYLSTGKSSEKTDVFGYGIMLLELITGQRAFDLARLANDDDVMLLDWVKGLLKEKKVEMLVDPDLQSGFVEHEVESLIQVALLCTQGSPMDRPKMSEVVRMLEGDGLAERWEEWQKVEVVRQEAELAPRHNDWIVDSTYNLRAMELSGPR

SEQ ID NO: 217 - DNA, 1890 bp, Poa pratensis
  CDS (1)..(1890)
atggcgagactacgacccttcgccggcggcgctggctccgtggcggcggcggtggtggtatttaccggctggctcctcgccaccggtggggtatcggccggggacccgccgctctcgcccaaagggctcaactacgaagtggcggcgctgatggcggtgaagagccggatgcgggacgagaagggggtgatggccgggtgggacatcaactccgtggacccctgcacctggtccatggtcacctgctccgccgaccaattcgtcgtctccctgcagatggcgaacaacgggttggcaggggcgctgtcgccgagcattgggaacctcagctacctgcagacaatgctactacagaataacagaatatccggcgacattcctccagaggtagggaagctggcgaagctgaaagctcttgatctttccggtaaccagtttcttggtgaaatcccgaattcgttggggcagctgactcaactaaattatctgcgccttgataggaacaacttgtctggacaaatccctataaatgttgcaagccttccgggtctcacattccttgacatatcattcaacaatttaagcggcccagttccaaaaatccatgcacacgactatagtcttgtgggaaacaagttcctttgcaattcgtcagttctgcatggttgcactgatgttaaaggagggacccacgatacaacatctagaccgttggctaaagcgaagaaccatcatcaattagcactggcaatttctctaagtgtcacttgtgccataatctttgtcctattctttgtattctggctaagctattgcagatggcgcttgccttttgcttctgctgatcaagatcttgaaatggaactaggtcatctgaagcatttttcgtttcacgagctgcaaaatgcaacagacaattttaattcaaaaaatatactaggccaaggcggctttggtgttgtttatagaggctgtcttagaaatggaactttagtggctgtcaagaggttaaaagatcctgatgttactggtgaagttcaattccagacagaagttgagttgattggcctagctgtgcacaggaaccttctgcccttgtatgggttttgcatgacctcgaaagaaagattgcttgtatatccatatatgccaaatggcagtgttgctgaccgcctaagagagtatcaccatggaaaaccttctcttgattggagcaaacgtatgcgtattgctattggggctgccaggggactactatatcttcatgaacaatgcaatcctaagatcattcacagggatgtcaaagcagcaaacatattgcttgatgaaggttttgaagcggttgttggggattttggattggcaaaactacttgaccgacaagattcacatgttactacggccgttcggggcactatcggtcatattgctccagagtatctctcaacaggccagtcttcagaaaagacagacgtgtatgggtttggaattctactattggaactgattactggacctaaaaccttgagcaacggacatggtcagtcccagaaagggatgattctggattgggttagagaactcaaggaggaaaagaaactggataaattagttgacagagacctcaaagatttgttcgacatagcggagctagagtgttcagtcgacgtaattatccaatgcacgctgaccagtcctattctgcggcccaagatgtcagaagttcttcaggccctggagtctaatgtcatgctggcagagaacggagtagacttgaatagagaagcgctgccttatggtggttcttgcagtttctctgtgagacatgaggatcctcacgactcatcgtccttcataatagagccaattgagctatctggtcctagatga

SEQ ID NO: 218 - protein, 629 aa, Poa pratensis
MARLRPFAGGAGSVAAAVVVFTGWLLATGGVSAGDPPLSPKGLNYEVAALMAVKSRMRDEKGVMAGWDINSVDPCTWSMVTCSADQFVVSLQMANNGLAGALSPSIGNLSYLQTMLLQNNRISGDIPPEVGKLAKLKALDLSGNQFLGEIPNSLGQLTQLNYLRLDRNNLSGQIPINVASLPGLTFLDISFNNLSGPVPKIHAHDYSLVGNKFLCNSSVLHGCTDVKGGTHDTTSRPLAKAKNHHQLALAISLSVTCAIIFVLFFVFWLSYCRWRLPFASADQDLEMELGHLKHFSFHELQNATDNFNSKNILGQGGFGVVYRGCLRNGTLVAVKRLKDPDVTGEVQFQTEVELIGLAVHRNLLPLYGFCMTSKERLLVYPYMPNGSVADRLREYHHGKPSLDWSKRMRIAIGAARGLLYLHEQCNPKIIHRDVKAANILLDEGFEAVVGDFGLAKLLDRQDSHVTTAVRGTIGHIAPEYLSTGQSSEKTDVYGFGILLLELITGPKTLSNGHGQSQKGMILDWVRELKEEKKLDKLVDRDLKDLFDIAELECSVDVIIQCTLTSPILRPKMSEVLQALESNVMLAENGVDLNREALPYGGSCSFSVRHEDPHDSSSFIIEPIELSGPR

SEQ ID NO: 219 - DNA, 1890 bp, Poa pratensis
  CDS (1)..(1890)
atggcgagactacgacccttcgccggcggcgctggctccgtggcggcggtggtggtggtatttaccggctggctcctcgccgccggtggggtatcggccggggacccgccgctctcgcccaaagggctcaactacgaagtggcggcgctgatggcggtgaagagccggatgcgggacgagaagggggtgatggccgggcgggacatcaactccgtcgacccctgcacctggtccatggtcacctgctccgccgaccaattcgtcgtctccctgcaggtggcgaacaacgggttgtcgggggcgctgtcgccgagcatcgggaacctcagctacctgcagacaatgttactacagaataacagaatatcaggtgacattcccccagaggtagggaagctggcgaagctgaaagctcttgatctttccggtaaccagtttgttggtgaaatcccgaattcgttggggcagctgactcaactaaattatctgcgccttgataggaacaacttgtctggacaaatccctgtaaatgttgcaagccttccaggtctcacattccttgacatatcattcaacaatttaagcggcccagttccaaaaatctatgcacacgactacagtcttgtgggaaacaagttcctttgcaattcgtcaattctgcatggttgcactgatgttaaaggaggaacccacgatacaacatctagaccgtcagctaaagcgaagaaccatcatcaattagcactggcaatttctttaagtgtcacctgtgccataatctttgtcctactctttgtatgctggctaagctattgcagatggcgcttgccttttgcttctgctgatcaagatcttgaaatggaactaggtcatctgaagcatttttcgtttcacgagctgcaaagtgcaacagacaattttaattcaaagaatatactaggccaaggcggctttggtgttgtttatagaggctgtcttagaaatggaactttagtggcagtcaagaggttaaaagatcctgatgttactggtgaagttcaattccagacagaagttgagttgattggcctagctgtgcacaggaaccttctgcgcttgtatgggttttgcatgacctcgaaagaaaggttgcttgtatatccgtatatgccaaatggcagtgttgctgaccgcctgagagaatatcgccatggaaaaccttctcttgattggagcaaacgtatgcgtattgctattggggctgccaggggactactatatcttcatgaacaatgcaatcctaagatcattcacagggatgtcaaagcagcaaacatattgcttgatgaaagttttgaagcggttgttggggattttggattggcaaaactacttgaccgacaagattcacatgttactacggccgttcggggcactattggtcatattgctccagagtatctctcaacaggccagtcttcagaaaagaccgacgtttacgggtttggaattctactattggaactgattactggacctaaaaccttgagcaacggacatggtcagtcccagaaagggatgattctagattgggttagagaactcaaggaggaaaagaaactggataaattagttgacagggacctcaaagatttgttcgacatagccgagctagagtgttcagtcgacgtaattatccaatgcacgctgaccaatcctattctgcggcccaagatgtcagaagttctccaggcccttgaatctaacgtcacgctggcagagaacggaatagacttgaatagagaagcgctgccttatggaggttcttgcagtttctctgtgagacatgaggatcctcacgactcatcgtccttcataatagagccaattgagctatctggtcctagatga

SEQ ID NO: 220 - protein, 629 aa, Poa pratensis
MARLRPFAGGAGSVAAVVVVFTGWLLAAGGVSAGDPPLSPKGLNYEVAALMAVKSRMRDEKGVMAGRDINSVDPCTWSMVTCSADQFVVSLQVANNGLSGALSPSIGNLSYLQTMLLQNNRISGDIPPEVGKLAKLKALDLSGNQFVGEIPNSLGQLTQLNYLRLDRNNLSGQIPVNVASLPGLTFLDISFNNLSGPVPKIYAHDYSLVGNKFLCNSSILHGCTDVKGGTHDTTSRPSAKAKNHHQLALAISLSVTCAIIFVLLFVCWLSYCRWRLPFASADQDLEMELGHLKHFSFHELQSATDNFNSKNILGQGGFGVVYRGCLRNGTLVAVKRLKDPDVTGEVQFQTEVELIGLAVHRNLLRLYGFCMTSKERLLVYPYMPNGSVADRLREYRHGKPSLDWSKRMRIAIGAARGLLYLHEQCNPKIIHRDVKAANILLDESFEAVVGDFGLAKLLDRQDSHVTTAVRGTIGHIAPEYLSTGQSSEKTDVYGFGILLLELITGPKTLSNGHGQSQKGMILDWVRELKEEKKLDKLVDRDLKDLFDIAELECSVDVIIQCTLTNPILRPKMSEVLQALESNVTLAENGIDLNREALPYGGSCSFSVRHEDPHDSSSFIIEPIELSGPR

SEQ ID NO: 221 - DNA, 1851 bp, Oryza sativa
  CDS (1)..(1851)
atggccgcgcggcggcgcctcctcctgctcctcgtcctcctgctgtgccgcctcgccgccgtcctccccacctccgaagtggaggccttgcagggtttcatggcagggttcgccggcggcaacgcggcgttccagagctgggacgcgtccgcgcccaacccttgcacctggttccatgtcacctgtggcccggggaaccaggtcatcaggctggatctcgggaaccagtcgctgtccggcgagttgaagcccgacatttggcagctgcaagcattgcaatccctggaactttatggcaatagcatcagcgggaaaatacctagcgagcttgggcggttagctagcttgcaaactttggatctctacttgaacaatttcaccggtgaaataccgaatgaactgggaaatttatcgaagctcagtaacctccgtctgaacaacaatagtctgtcaggtgcaattcccatgtcattgacaacaatccaaaatcttgaagtgctggacttgtcacataacaacttgtcgggaataataccgaccaatggttcattttcacacttcaccccaatcagtttctccaataacccacgtactttcgcaaattcttctgattcgccatcaaataactcgggagcagcggtgccatcaggaagaagtagtgcatccagcattggaacaattgctggtggagctgctgcaggtgctgccatgttgtttgctgctcctattgtattgttcgcatggtggtggcggcgtaaaccacatgaccaattctttgacctactagaagaagaaactccagaagttcatctgggtcagcttagaaggttcacactgagagaactgcaggtggcaacagataacttcagtcaaactaatttgctagggagaggaggctttggaaaggtctataaaggaaggttgttagatggttcattgatagcaataaaaagactaaatgaagatcgaattggaactggagagcggcagttcctaatggaagtcgagatcatcagcatggccgtgcatcaaaatctcctacgcctccaggggtattgtatgacacccaccgagcggctgcttgtgtatccttacatggagaataaaagccttgagacacgcttacgagagtgctctgattcacaacaaccacttgactggccaacacgaagaaaaatcgcgttagggtctgcaagagggatctcttacttgcatgaaggatgtgatcccaaaattatccatcgagatgtcaaagctgctaacattttgttggatgaaaaacttgaagcagttgttggtgatttcggtctggctagaattatggattacaaagtttcccatgttgtaaccggcgtgatggggacattggggcacattcccatggagtacctgactgcaggaagaacttcagataaaactgatgtttttgggtatggaatcatgctttttgaactgattagtgggaaaaggggatttgatcttgttggtcttgcaaatgaagaaaatgccagagtgcatgattgggtgaagaaactgctggaagaggacaggctggaggtgctgattgacccaaacttactggaaatctacaatggtggggaacagggagtgcgagaggagatgaggttgctggtgcagattgcgctgctctgcacccaggagtccgctccaagccgccccagaatgtcaacggtggtgacaatgctagaagacggtatcgcggagcactgggatgcatggcaaaggaagacgattgtgcaggcaagcctgcaaggaggacagggcgtttctgaggctcgcaatgactctgttgcaaatctccctccagacacattgtctggtccaaggtga

SEQ ID NO: 222 - protein, 616 aa, Oryza sativa
MAARRRLLLLLVLLLCRLAAVLPTSEVEALQGFMAGFAGGNAAFQSWDASAPNPCTWFHVTCGPGNQVIRLDLGNQSLSGELKPDIWQLQALQSLELYGNSISGKIPSELGRLASLQTLDLYLNNFTGEIPNELGNLSKLSNLRLNNNSLSGAIPMSLTTIQNLEVLDLSHNNLSGIIPTNGSFSHFTPISFSNNPRTFANSSDSPSNNSGAAVPSGRSSASSIGTIAGGAAAGAAMLFAAPIVLFAWWWRRKPHDQFFDLLEEETPEVHLGQLRRFTLRELQVATDNFSQTNLLGRGGFGKVYKGRLLDGSLIAIKRLNEDRIGTGERQFLMEVEIISMAVHQNLLRLQGYCMTPTERLLVYPYMENKSLETRLRECSDSQQPLDWPTRRKIALGSARGISYLHEGCDPKIIHRDVKAANILLDEKLEAVVGDFGLARIMDYKVSHVVTGVMGTLGHIPMEYLTAGRTSDKTDVFGYGIMLFELISGKRGFDLVGLANEENARVHDWVKKLLEEDRLEVLIDPNLLEIYNGGEQGVREEMRLLVQIALLCTQESAPSRPRMSTVVTMLEDGIAEHWDAWQRKTIVQASLQGGQGVSEARNDSVANLPPDTLSGPR

SEQ ID NO: 223 - DNA, 1866 bp, Citrus unshiu
  CDS (1)..(1866)
atgaagactaaggtttgggctttgtgtttgatcttggtggtccattcatcatggcttgcttctgctaacatggaaggtgatgctttgcatagcttgagatccaacttaattgatcctaacaatgtactgcacagttgggatccctacccttgtcaatccctgcacatggtttcatgttacatgcaaatgaataatagtgttatactagttgatcttgaaaatgcggctttgtctggtcaactagtttcacagctgggcttgctcaagaatttgcagtatttggaactctacagcaataacataactggaccaattcctagtgaccttgggaatttgactagcttggtgagcttggatctctacttgaacagtttcactggtcctatcccagacacattgggaaaactgtcaaaattgcggttcctccggcttaacaacaacagtctctcgggtccaattcctatgtcattgactaatatctcctctcttcaagtattggatctatcaaacaatcggctttctggggtggttccagacaatggctccttctcattatttactcccatcagttttgctaacaacttggatctatgtgggccagttaccgggcgcccctgcccaggatctcctccattttctcctcctcctccattcatcccaccacccccaatttcttcaccaggtggaaatagtgctactggagcaattgctggaggtgtggctgctggtgctgccttattgtttgctgctcctgctatagcatttgcatggtggcgtcggagaaaacctcaagaatttttctttgatgtacctgctgaagaggatcccgaagttcatcttgggcagcttaaaagattttcactgcgagaattacaagttgcaacagatagttttagcaataaaaacattctgggtagaggtgggttcggtaaggtctacaaaggacgcctggcagatggttcactggtagctgtaaaaagattgaaagaagagcgtactcctggtggggagctgcagtttcagactgaagtagagatgatcagtatggctgtacatcgtaatctccttcgcttgcgtggcttctgtatgacaccaactgaaaggctgcttgtttatccctatatggcaaatggaagtgtcgcatcttgtttaagagaacgtcccccatcacaacttcctcttgattggccaactcggaaacggattgctttggggtccgctaggggtctttcgtatttgcatgatcattgtgatccaaagatcattcaccgtgatgtgaaagcggctaacattttgttggatgaggagtttgaagctgttgttggggactttgggttggctaaacttatggactacaaggatacccatgtcactacggcagtccgtggcaccattgggcatatagctccagaatacctttctactggaaaatcttcagagaaaactgatgtctttggttatgggattatgcttctagagctaatcactggacagagagcctttgatcttgctcgtctggcaaatgatgatgatgtcatgctgcttgattgggtgaaaggacttctgaaggaaaagaagttagaaatgctagttgaccctgatctccagaacaattatgtggaagctgaggtggagcaacttatccaggttgcgttgctctgcactcaaggctcccctatggaccggcccaagatgtcggaagttgttagaatgcttgaaggtgatggcttggcagagcggtgggatgagtggcaaaaggtggaagttctccgccaagaagtagaattagcccctcatcctaattcagattggatagttgactcaacagaaaatcttcatgccgttgagttatctggtccaaggtga

SEQ ID NO: 224 - protein, 621 aa, Citrus unshiu
MKTKVWALCLILVVHSSWLASANMEGDALHSLRSNLIDPNNVLHSWDPYPCQSLHMVSCYMQMNNSVILVDLENAALSGQLVSQLGLLKNLQYLELYSNNITGPIPSDLGNLTSLVSLDLYLNSFTGPIPDTLGKLSKLRFLRLNNNSLSGPIPMSLTNISSLQVLDLSNNRLSGVVPDNGSFSLFTPISFANNLDLCGPVTGRPCPGSPPFSPPPPFIPPPPISSPGGNSATGAIAGGVAAGAALLFAAPAIAFAWWRRRKPQEFFFDVPAEEDPEVHLGQLKRFSLRELQVATDSFSNKNILGRGGFGKVYKGRLADGSLVAVKRLKEERTPGGELQFQTEVEMISMAVHRNLLRLRGFCMTPTERLLVYPYMANGSVASCLRERPPSQLPLDWPTRKRIALGSARGLSYLHDHCDPKIIHRDVKAANILLDEEFEAVVGDFGLAKLMDYKDTHVTTAVRGTIGHIAPEYLSTGKSSEKTDVFGYGIMLLELITGQRAFDLARLANDDDVMLLDWVKGLLKEKKLEMLVDPDLQNNYVEAEVEQLIQVALLCTQGSPMDRPKMSEVVRMLEGDGLAERWDEWQKVEVLRQEVELAPHPNSDWIVDSTENLHAVELSGPR

SEQ ID NO: 225 - DNA, 1857 bp, Gossypium hirsutum
  CDS (1)..(1857)
atggagcagcacattatgtgggtgttttggttctttttacattggttttgttcggtccattcagtttcagatggtgatagtctcctttctcccaaaggagttaactatgaagtggctgctttgatgtcggtgaagagagagctgagagattataagcaggttatggatggctgggatatcaactcggttgatccttgtacatggaacatggtggcttgttctgctgaaggtttcgttatctcactagaaatggccagcacagggttatcaggtctgctttcacccagcattgggaatttgagtcacctaaggacaatgttgttgcaaaacaatcagttatcaggtcccatcccggatgagatagggaaactctcggagcttcaaactctggatctttccggtaaccactttgttggagcaattccaagtactttgggctctctaactcatctaagttatctgaggcttagcaagaacaatttatctggacctattcctagacacgttgcgaatctcaccggtctttcgttcttggacttatcatataataatctcagtggtcctactccgaaaatactagcaaaaggttatagtattacgggaaacaactttctttgtgcttcttctgaacatatatgcacagatgtttcttatccattaaatggctcagtttcgtcttctcgagtcagtggaaaccatcattggctgctttctgttgccataggaattggttttgcatttgtggtttccgtgatgctgcttgcttgttgggtgcgttggtacagatctcagattatgctaccctcatacgtgcagcaggattatgattttgaaattggtcatctaaagaggttctcctatcgtgaactgcaaatcgccaccagtaattttaactccaaaaacattttaggacaaggaggatatggagttgtctataaagggtgtcttccaaataggtcagtggttgcggttaaaaggcttaaagatcctaatttcacaggagaagtgcaatttcaaactgaagtagagatgattggtttagctcttcaccgtaacctcttacgtttgtatggcttctgtatgacacctgatgagagattgcttgtgtatccttacatgccaaatggtagtgttgccgatcgtttaagagatgcttgtcatggaaagcctgctttgaattggagtagacgaatgcatattgcccttggagctgctcgtggacttctatatttacacgagcaatgtaatcccaaaataattcaccgggatgtaaaagctgcaaacattttgcttgacgaaagctttgaagctgtggtaggggattttggtcttgctaagctcttagataaacgggattcccatgttactactgctgtgcgagggactgtaggacacatagccccggagtatctttcaaccggacagtcttctgagaaaacagatgtctttggatttgggatactactgttggaactcatcactggacaaaagacattagatgctggtaatggacaggttcaaaagggaatgattcttgactgggttaggacattgcacgaggagaggagacttgaagtgctagtggacagggatttacaaggatgcttcgacacaatcgagttggaaacagtaacagagttggcgctgcagtgtactcgaccacaaccacaccttcgccccaagatgtctgaagttttgaaggtccttgaaggtcttgtgcagtcgggaacagaagaaccacaaggtggaacaaaccattgcgagaccagcgcatatagcttctctaggaattacagtgacgttcatgaagagtcatccttcatcattgaagcaatggaactttccggacctcggtaa

SEQ ID NO: 226 - protein, 618 aa, Gossypium hirsutum
MEQHIMWVFWFFLHWFCSVHSVSDGDSLLSPKGVNYEVAALMSVKRELRDYKQVMDGWDINSVDPCTWNMVACSAEGFVISLEMASTGLSGLLSPSIGNLSHLRTMLLQNNQLSGPIPDEIGKLSELQTLDLSGNHFVGAIPSTLGSLTHLSYLRLSKNNLSGPIPRHVANLTGLSFLDLSYNNLSGPTPKILAKGYSITGNNFLCASSEHICTDVSYPLNGSVSSSRVSGNHHWLLSVAIGIGFAFVVSVMLLACWVRWYRSQIMLPSYVQQDYDFEIGHLKRFSYRELQIATSNFNSKNILGQGGYGVVYKGCLPNRSVVAVKRLKDPNFTGEVQFQTEVEMIGLALHRNLLRLYGFCMTPDERLLVYPYMPNGSVADRLRDACHGKPALNWSRRMHIALGAARGLLYLHEQCNPKIIHRDVKAANILLDESFEAVVGDFGLAKLLDKRDSHVTTAVRGTVGHIAPEYLSTGQSSEKTDVFGFGILLLELITGQKTLDAGNGQVQKGMILDWVRTLHEERRLEVLVDRDLQGCFDTIELETVTELALQCTRPQPHLRPKMSEVLKVLEGLVQSGTEEPQGGTNHCETSAYSFSRNYSDVHEESSFIIEAMELSGPR

SEQ ID NO: 227 - DNA, 1857 bp, Gossypium hirsutum
  CDS (1)..(1857)
atggagcagcacattatgtgggtgttttggttctttttacattggttttgttcggtccattcagcttcagatggtgatagtctcctttctcccaaaggagttaactatgaagtggctgctttgatgtcggtgaagagagagctgagagatgataagcaggttatggatggctgggatatcaactcggttgatccttgtacatggaacatggtggcttgttctgctgaaggtttcgttatctcactagaaatggccagcacagggttatcaggtatgctttcacccagcattgggaatttgagtcacctaaggacaatgttgttgcaaaacaatcagttatcaggtcccatcccagatgagatagggaaactctcggagcttcaaactctggatctttctggtaaccactttgtcggagcaattccaagtactttgggctctctaactcatctaagttatctgaggcttagcaagaacaatttatctggacctattcctagacacgttgcaaatctcaccggtctttcattcttggacttatcatataataatctcagtggtcctactccgaaaatactagcaaaaggttatagtattacgggaaacaactttctttgtgcttcttctgaacatatatgcacagatgtttcgtatccattaaatggctcagtttcgtcttctcgagtcagtggaaaccatcattggctgctttctgttgccataggaattggtttcgcatttgtggtttccgtgatgctgcttgcttgttgggtgcattggtacagatctcggattatgcttccctcatacgtgcagcaagattatgattttgaaatcggtcatctaaagaggttctcctatcgtgaactgcaaattgccaccggcaattttaaccccaaaaacattctaggacaaggaggatatggagttgtctataaagggtgtcttccaaataggtcagtggttgcggttaaaaggcttaaagatcctaatttcacaggagaagtgcaatttcaaactgaagtagagatgattggtttagctcttcaccgtaacctcttacgtttgtatggcttctgtatgacacctgatgagagattgcttgtgtatccttatatgccaaatggtagtgttgccgatcgtttaagagatgcttgtcatggaaagcctgctttgaattggagtagacgaatgcatattgcccttggagctgctcgtggacttctatatttacacgagcaatgtaatcccaaaataattcaccgggatgtaaaagctgcaaacattttgcttgacgaaagctttgaagctgtggtaggggattttggtcttgctaagctcttagataaacgggattcccatgttactactgctgtgcgagggactgtaggacacatagccccggagtatctttcaactggacagtcttctgagaaaacagatgtctttggatttgggattctactgttggaactcatcactggacaaaagacattagatgctggtaatggacaggttcaaaagggaatgattcttgactgggttaggacattgcacgaggagaggagacttgaagtgctagtggacagggatttacagggatgcttcgacacaatcgagttggaaacagtaacagagttggcgctgcagtgtactcgaccacaaccacaccttcgccccaagatgtctgaagttttgaaggtccttgaaggtcttgtgcagtcaggaacagatgaaccacaaggtggaacaaaccattgcgagaccagcgcatatagcttctctaggaattacagtgacgttcatgaagagtcatccttcatcattgaagcaatggaactttccggacctcggtaa

SEQ ID NO: 228 - protein, 618 aa, Gossypium hirsutum
MEQHIMWVFWFFLHWFCSVHSASDGDSLLSPKGVNYEVAALMSVKRELRDDKQVMDGWDINSVDPCTWNMVACSAEGFVISLEMASTGLSGMLSPSIGNLSHLRTMLLQNNQLSGPIPDEIGKLSELQTLDLSGNHFVGAIPSTLGSLTHLSYLRLSKNNLSGPIPRHVANLTGLSFLDLSYNNLSGPTPKILAKGYSITGNNFLCASSEHICTDVSYPLNGSVSSSRVSGNHHWLLSVAIGIGFAFVVSVMLLACWVHWYRSRIMLPSYVQQDYDFEIGHLKRFSYRELQIATGNFNPKNILGQGGYGVVYKGCLPNRSVVAVKRLKDPNFTGEVQFQTEVEMIGLALHRNLLRLYGFCMTPDERLLVYPYMPNGSVADRLRDACHGKPALNWSRRMHIALGAARGLLYLHEQCNPKIIHRDVKAANILLDESFEAVVGDFGLAKLLDKRDSHVTTAVRGTVGHIAPEYLSTGQSSEKTDVFGFGILLLELITGQKTLDAGNGQVQKGMILDWVRTLHEERRLEVLVDRDLQGCFDTIELETVTELALQCTRPQPHLRPKMSEVLKVLEGLVQSGTDEPQGGTNHCETSAYSFSRNYSDVHEESSFIIEAMELSGPR

SEQ ID NO: 229 - DNA, 1863 bp, Oryza sativa
  CDS (1)..(1863)
atggcggggccccgcgccctcgccgtggcggcggcggtggtggtcgccgcgtgggccgtcgccgccgccggggacccgccgctgtcgcccaaggggctcaactacgaagtggcggcgctgatggcggtgaagagcaggatgcgggacgagaagggggtgatgggagggtgggacatcaactccgtcgacccgtgcacctggtccatggtcgcctgctcccccgacggattcgtcgtctcgctgcagatggcgaacaacggattggccgggacgctgtcgccgagcatcgggaacctcagccacctgcagacaatgttactacagaataacatgatatcaggtggcattcctccagagattgggaagttgaccaatctgaaagctcttgatctttctggtaaccagtttgttggtgaaatcccaagttctctagggcggctgactgaattaaactatctgcgcctagataagaacaacttgtctggacagatccctgaagatgtcgcaaagcttccaggtctcacattccttgatttatcatccaataatttgagcggcccggttccaaaaatctatgcacatgactacagtattgcaggaaacaggttcctttgcaattcatcaattatgcatggttgcaaagatctcacagtattaactaatgaatcaacaatttctagcccgtcgaaaaaaacaaacagccatcatcaactagctctggcaatttcattaagcatcatctgtgccacagtatttgttctgtttgtcatttgttggctaaaatattgcagatggcgcttgccttttgcttctgctgaccaagatcttgaaattgaattgggccatctaaagcacttctcatttcacgagcttcagagtgcaactgacaatttcaactcaaagaacatattaggtcaaggtggctttggtgttgtttataaaggctgtctgagaaatggagctttggtggctgtaaagagactaaaagatcctgatattactggtgaagttcaatttcagacagaagtggagttgattggtctagctgtgcacaggaaccttttgcggttatatggattctgcatgacctcaaaagaaaggttgcttgtatatccatatatgccaaatggcagtgttgctgatcgcttgagagattaccatcatggaaaaccatctcttgattggagcaagcgtatgcggattgctgttggggcagccaggggactgctgtatcttcacgaacaatgcaatcctaaaatcattcacagggatgttaaagcagctaacattttgcttgatgaaagttttgaagcaattgttggggattttggattggcaaaacttcttgaccgacaagaatcacatgttactactgcagttaggggcactattggacatattgctccagagtatttatcaacaggacagtcttcagaaaagaccgatgtttatgggtttggtattctcttgttggaactgatcactgggcctaaaaccttgagcaatgggcacgcgcaatctcagaagggaatgattctagattgggttagagaagtcaaggaagaaaataaactggataaactggttgacagggatctgaaatattcatttgatttcgccgagttggagtgttctgttgacgtaattctgcaatgcactcagaccaatcccattttgcgtcccaagatgtcggaagtccttaatgcccttgaagctaatgtcaccctgccagagaacggcatcgacttgaatagagaagtgcctccctatggaggatcttgcagtttctcagtaaggcatgaggatcctcatgattcatcatccttcataatagagccaattgagctatctggtcccagatga

SEQ ID NO: 230 - protein, 620 aa, Oryza sativa
MAGPRALAVAAAVVVAAWAVAAAGDPPLSPKGLNYEVAALMAVKSRMRDEKGVMGGWDINSVDPCTWSMVACSPDGFVVSLQMANNGLAGTLSPSIGNLSHLQTMLLQNNMISGGIPPEIGKLTNLKALDLSGNQFVGEIPSSLGRLTELNYLRLDKNNLSGQIPEDVAKLPGLTFLDLSSNNLSGPVPKIYAHDYSIAGNRFLCNSSIMHGCKDLTVLTNESTISSPSKKTNSHHQLALAISLSIICATVFVLFVICWLKYCRWRLPFASADQDLEIELGHLKHFSFHELQSATDNFNSKNILGQGGFGVVYKGCLRNGALVAVKRLKDPDITGEVQFQTEVELIGLAVHRNLLRLYGFCMTSKERLLVYPYMPNGSVADRLRDYHHGKPSLDWSKRMRIAVGAARGLLYLHEQCNPKIIHRDVKAANILLDESFEAIVGDFGLAKLLDRQESHVTTAVRGTIGHIAPEYLSTGQSSEKTDVYGFGILLLELITGPKTLSNGHAQSQKGMILDWVREVKEENKLDKLVDRDLKYSFDFAELECSVDVILQCTQTNPILRPKMSEVLNALEANVTLPENGIDLNREVPPYGGSCSFSVRHEDPHDSSSFIIEPIELSGPR

SEQ ID NO: 231 - DNA, 1875 bp, Oryza sativa
  CDS (1)..(1875)
atggcggcgcatcggtgggcggtgtgggcggtgctgctgctgcggctgctcgtgccggcggcgcgggtgctcgccaacatggaaggtgatgcattgcatagcttgaggactaatttagttgatcctaataatgttctacaaagttgggacccaactctggtcaatccgtgcacttggtttcatgttacttgcaataacgacaacagtgttatcagagttgatcttgggaatgctgcactatcaggcactttggtcccacaacttgggcaactaaaaaacttgcaatacctggagctctacagtaataacataagcggaacgatacctagtgaacttggaaacctcacaaacttggtcagtttggatttgtacttgaacaacttcactggtccaataccagattcacttggaaacctattgaagctacgattcctgcgtcttaacaataacagcctttcgggttcaattcctaaatcactaactgctatcactgccctacaagttctagatctttcaaacaacaatttgtctggagaagttccatacaaacatggcttttcattattcacccctatcagttttgccaacaacccttccttgtgtggtcctgggaccacaaaaccttgccctggtgctccccccttttccccacctcctccatataatcctccaactcctgtgcagtcaccagggagttcatctagtactggagcaattgctggtggagtggctgctggagcagccttgctatttgctattcctgctattggttttgcatggtatcggcgcaggaaaccccaagagcatttctttgatgtgcctgctgaggaggatccagaggtccatcttggccagcttaaaagattttcactacgagaactacaagttgcaacagataccttcagcaataaaaacattctcggaagaggtgggtttggcaaggtctataaaggaagattagcagatggttctttagtagctgttaagagactaaaggaggagagaacacctggtggggaactacagtttcaaacagaagttgagatgattagcatggccgtacatagaaatctgctgcgtttacgagggttctgtatgacacccacagaaaggttgcttgtgtatccatacatggctaatggaagcgttgcatcacgtcttagagaacggccaccatcggaacctccacttgattggcgaacaagaagaaggattgcgttgggttccgccagggggctgtcctatttacatgatcattgtgacccaaagattatccatcgtgatgtcaaagctgcaaatattttattagatgaagactttgaagctgtagtaggggactttggtttggccaaactaatggattacaaggatacccatgtaacaactgcagttcgtggaacaattgggcatattgcaccagaatatctttcaacaggaaaatcatctgagaaaactgatgtatttggttatgggattatgcttttggagcttataacaggacaacgtgcctttgaccttgctcgtctagccaatgatgatgatgtcatgctactggactgggtaaaaggattactcaaggagaaaaggctggagatgttggttgatccagatttacagagcaactacattgatgttgaggtagaatcactaatccaggttgctcttctttgcacacaaggctcccccacagaacgccccaagatggcggaggttgtgaggatgcttgaaggtgatggccttgccgagagatgggaggagtggcagaagatagaagtagtacggcaggaggtagagcttggccctcatcggaactcagagtggattgtcgactcgacggacaaccttcatgcggttgagctatcagggccgaggtga

SEQ ID NO: 232 - protein, 624 aa, Oryza sativa
MAAHRWAVWAVLLLRLLVPAARVLANMEGDALHSLRTNLVDPNNVLQSWDPTLVNPCTWFHVTCNNDNSVIRVDLGNAALSGTLVPQLGQLKNLQYLELYSNNISGTIPSELGNLTNLVSLDLYLNNFTGPIPDSLGNLLKLRFLRLNNNSLSGSIPKSLTAITALQVLDLSNNNLSGEVPYKHGFSLFTPISFANNPSLCGPGTTKPCPGAPPFSPPPPYNPPTPVQSPGSSSSTGAIAGGVAAGAALLFAIPAIGFAWYRRRKPQEHFFDVPAEEDPEVHLGQLKRFSLRELQVATDTFSNKNILGRGGFGKVYKGRLADGSLVAVKRLKEERTPGGELQFQTEVEMISMAVHRNLLRLRGFCMTPTERLLVYPYMANGSVASRLRERPPSEPPLDWRTRRRIALGSARGLSYLHDHCDPKIIHRDVKAANILLDEDFEAVVGDFGLAKLMDYKDTHVTTAVRGTIGHIAPEYLSTGKSSEKTDVFGYGIMLLELITGQRAFDLARLANDDDVMLLDWVKGLLKEKRLEMLVDPDLQSNYIDVEVESLIQVALLCTQGSPTERPKMAEVVRMLEGDGLAERWEEWQKIEVVRQEVELGPHRNSEWIVDSTDNLHAVELSGPR

SEQ ID NO: 233 - DNA, 1884 bp, Ipomoea batatas
  CDS (1)..(1884)
atggaaagggagtggtttctgccattcaaagttctgggcttggggatttggatgttaatagccacttcttgctctgctactctttcaccatctggggtgaactatgaagtggtggctttgattgctataaagactggtttacatgacccttacaatgttctggaaaattgggatgttaactctgtagacccctgcagttggagaatggttacctgttcaccagatggctatgtgtctgccttgggactacccagccagagtttatcagggaccttgtcacctggaattggcaacttaacaaacttgcagtctgtgttgctgcaaaacaatgctatttcaggacatattccggctgagatcgggaaattagaaaggcttcagaccctcgatctttccaacaacaaattcaacggcgatatacccagcacattgggggacctaaggaatttgaattatttgcgactcaacaacaacagcctttcgggacaaatcccagaatctctctctaaagttgatggtcttactcttgtggatgtttcttttaataacctcagtggcagaccccctaaactaccagcaagaactttcaaagttattggcaatcctttaatttgcgggcagagttctgagaataattgttcagtaatctatccagaaccactgtcgtttccacccgatgctggaaaaggtcaatcagatgctggagcaaaaaaacatcacgtggctattgcttttggagcaagttttggcgccttattcttaatcatcgtgctcgtgtcccttatctggtggcgctatagacggaatcagcagatcttttttgatctcaatgataactatgatccagaggtctgcctgggccatttgagacggtacacctacaaggaactgcggactgcaactgaccatttcaactcgaagaatattttaggaaggggaggatttgggatagtgtacaagggttccttaaatgatggcactattgtggctgtcaaaaggttgaaggactataatgctgctggtggcgagatccaattccagacagaagtcgagatgattagccttgctgtccatcgaaatctcctccgactttgggggttctgttcaaccgagaatgagaggctcctcgtttacccttatatgccaaatgggagtgtagcgtcaagattaaaagatcatgtccatggtaggccggtgttagactggtcaaggaggaaaagaatagcgttagggactgcaagggggctggtgtatttgcacgagcagtgtgaccccaaaatcatccatcgtgatgtcaaagcggccaacattctgttggacgaagactttgaggctgttgttggagattttgggttggcgaagctattggatcaccgcgaatctcatgtgtctactgctgttcggggcactgtcggacacattgctcccgagtatttgtcaacaggccaatcatccgaaaagaccgatgtatttggctttggaatcctgcttcttgaactaattactggtcagaaagctgtggactttgggcgaggggctaaccagaaaggagtaatacttgactgggtaaaaaccctgcatcaagaagggaaattgaacttgatggtggacaaagatttgaagaacaattttgacagggttgaactagaagagatggttcaggttgccctcctttgcacccagttcaatccttctcatagaccaaaaatgtcggaagtgctaaggatgctggaaggcgacggcctagctgaaaaatgggaggcttcacagaggaacgatactccaaggtatcgcactcatgaaaacacgccccaaagatactccgacttcatagaagagtcctctctaatcgtcgaagcaatggagctgtctggacctagatga

SEQ ID NO: 234 - protein, 627 aa, Ipomoea batatas
MEREWFLPFKVLGLGIWMLIATSCSATLSPSGVNYEVVALIAIKTGLHDPYNVLENWDVNSVDPCSWRMVTCSPDGYVSALGLPSQSLSGTLSPGIGNLTNLQSVLLQNNAISGHIPAEIGKLERLQTLDLSNNKFNGDIPSTLGDLRNLNYLRLNNNSLSGQIPESLSKVDGLTLVDVSFNNLSGRPPKLPARTFKVIGNPLICGQSSENNCSVIYPEPLSFPPDAGKGQSDAGAKKHHVAIAFGASFGALFLIIVLVSLIWWRYRRNQQIFFDLNDNYDPEVCLGHLRRYTYKELRTATDHFNSKNILGRGGFGIVYKGSLNDGTIVAVKRLKDYNAAGGEIQFQTEVEMISLAVHRNLLRLWGFCSTENERLLVYPYMPNGSVASRLKDHVHGRPVLDWSRRKRIALGTARGLVYLHEQCDPKIIHRDVKAANILLDEDFEAVVGDFGLAKLLDHRESHVSTAVRGTVGHIAPEYLSTGQSSEKTDVFGFGILLLELITGQKAVDFGRGANQKGVILDWVKTLHQEGKLNLMVDKDLKNNFDRVELEEMVQVALLCTQFNPSHRPKMSEVLRMLEGDGLAEKWEASQRNDTPRYRTHENTPQRYSDFIEESSLIVEAMELSGPR

SEQ ID NO: 235 - DNA, 1884 bp, Medicago truncatula
  CDS (1)..(1884)
atggaggagacaaagttctgtgctttagctttcatttgtgccttctttctgctgttgcttcatccattatggctggtttctgctaacatggaaggtgatgctttacataacttgaggacaaatttacaagatcctaataatgttttgcaaagttgggatcctacacttgttaatccttgtacatggtttcatgtaacctgcaacaatgataatagtgtcataagagttgatctgggaaatgctgctttatcgggcacactagttccacagctcgggcaactcaagaatttgcagtatctggaactttacagcaataacatcactggtcctattccaagtgacctggggaatcttactaacttggtgagcttggatctgtacctaaatcggttcaatggccctatcccggattcattgggcaagttgtcaaaattgcgttttctgcggcttaataacaacagcttgatgggtcctattcccatgtcactgactaatatttcagctctacaagttctggatttgtctaataaccagctctcaggtgtggttccggataatggctccttttcgttattcacccctatcagttttgcaaacaacttgaatctatgtggacctgttaccgggcatccttgtccaggctctcctccattttctccacctcccccatttgtccctccacctccaatctctgccccaggaagtggcggtgcaactggagcaatagctggaggagttgctgccggtgctgctctattatttgccgcacctgcaattgcatttgcatggtggcgtcgaaggaaaccacaagaatttttctttgatgttcctgctgaagaggatcctgaagttcatcttgggcagcttaagaggttctcactccgagagttgcaagttgcaacagatactttcagcaataagaacattcttggaagaggagggtttggcaaggtgtacaaaggacgtttggctgacggttcactggttgctgtcaaaagattaaaagaggagcggacacctggtggggagcttcagtttcagactgaagtagagatgatcagcatggctgtgcatagaaatctcctccgtttacgcgggttttgtatgacaccaaccgaaaggttactggtttatccctacatggctaatggaagtgttgcctcctgtttaagagagcgtcctccacatcaagaaccactagattggccaacaagaaaaagaatagctttgggatcagctaggggtctttcatatttgcatgatcattgtgacccaaaaatcattcatcgtgacgtgaaagctgctaacatattgttggatgaagagtttgaggctgttgtgggggattttggattggcaaaacttatggattacaaggacacccatgttacaactgctgttcggggtacaattgggcatatagctcccgagtacctatctactggcaagtcttcagagaaaactgatgtttttggttatggtatcatgcttcttgagcttataactggacaaagagcttttgaccttgctcgacttgcgaatgatgatgatgttatgctgcttgattgggtaaaaggacttctgaaagagaaaaagcttgaaatgttggttgatcccgatcttaaaaccaactacatagaagctgaggtagaacagttaatccaggttgcgctgctatgcacgcaaggttcgcctatggaccggccaaagatgtcagatgtagtgagaatgcttgaaggcgatggcttggcagaaagatgggatgagtggcaaaaaggggaagttctacgccaggaagtggaattggcacctcatcccaattctgattggattgttgactctactgaaaatctacatgcagtcgaattatctggtccaagatga

SEQ ID NO: 236 - protein, 627 aa, Medicago truncatula
MEETKFCALAFICAFFLLLLHPLWLVSANMEGDALHNLRTNLQDPNNVLQSWDPTLVNPCTWFHVTCNNDNSVIRVDLGNAALSGTLVPQLGQLKNLQYLELYSNNITGPIPSDLGNLTNLVSLDLYLNRFNGPIPDSLGKLSKLRFLRLNNNSLMGPIPMSLTNISALQVLDLSNNQLSGVVPDNGSFSLFTPISFANNLNLCGPVTGHPCPGSPPFSPPPPFVPPPPISAPGSGGATGAIAGGVAAGAALLFAAPAIAFAWWRRRKPQEFFFDVPAEEDPEVHLGQLKRFSLRELQVATDTFSNKNILGRGGFGKVYKGRLADGSLVAVKRLKEERTPGGELQFQTEVEMISMAVHRNLLRLRGFCMTPTERLLVYPYMANGSVASCLRERPPHQEPLDWPTRKRIALGSARGLSYLHDHCDPKIIHRDVKAANILLDEEFEAVVGDFGLAKLMDYKDTHVTTAVRGTIGHIAPEYLSTGKSSEKTDVFGYGIMLLELITGQRAFDLARLANDDDVMLLDWVKGLLKEKKLEMLVDPDLKTNYIEAEVEQLIQVALLCTQGSPMDRPKMSDVVRMLEGDGLAERWDEWQKGEVLRQEVELAPHPNSDWIVDSTENLHAVELSGPR

SEQ ID NO: 237 - DNA, 1890 bp, Arabidopsis thaliana
  CDS (1)..(1890)
atgataacaagatctttcttttgcttcttgggatttttatgccttctctgctcttctgttcacggattgctttctcctaaaggtgttaactttgaagtgcaagctttgatggacataaaagcttcattacatgatcctcatggtgttcttgataactgggatagagatgctgttgatccttgtagttggacaatggtcacttgttcttctgaaaactttgtcattggcttaggcacaccaagtcagaatttatctggtacactatctccaagcattaccaacttaacaaatcttcggattgtgctgttgcagaacaacaacataacagggaaaattcctgctgagattggtcggcttacgaggcttgagactcttgatctttctgataatttcttccacggtgaaattcctttttcagtaggctatctacaaagcctgcaatatctgaggcttaacaacaattctctctctggagtgtttcctctgtcactatctaatatgactcaacttgcctttcttgatttatcatacaacaatcttagtggtcctgttccaagatttgctgcaaagacgtttagcatcgttgggaacccgctgatatgtccaacgggtaccgaaccagactgcaatggaacaacattgatacctatgtctatgaacttgaatcaaactggagttcctttatacgccggtggatcgaggaatcacaaaatggcaatcgctgttggatccagcgttgggactgtatcattaatcttcattgctgttggtttgtttctctggtggagacaaagacataaccaaaacacattctttgatgttaaagatgggaatcatcatgaggaagtttcacttggaaacctgaggagatttggtttcagggagcttcagattgcgaccaataacttcagcagtaagaacttattggggaaaggtggctatggaaatgtatacaaaggaatacttggagatagtacagtgattgcagtgaaaaggcttaaagatggaggagcattgggaggagagattcagtttcagacagaagttgaaatgatcagtttagctgttcatcgaaatctcttaagactctacggtttctgcatcacacaaactgagaagcttctagtttatccttatatgtctaatggaagcgttgcatctcgaatgaaagcaaaacctgttcttgactggagcataaggaagaggatagccataggagctgcaagagggcttgtgtatctccatgagcaatgtgatccgaagattatccaccgcgatgtcaaagcagcgaatatacttcttgatgactactgtgaagctgtggttggcgattttggtttagctaaactcttggatcatcaagattctcatgtgacaaccgcggttagaggcacggtgggtcacattgctccagagtatctctcaactggtcaatcctctgagaaaacagatgtttttggcttcgggattcttcttcttgagcttgtaaccggacaaagagcttttgagtttggtaaagcggctaaccagaaaggtgtgatgcttgattgggttaaaaagattcatcaagagaagaaacttgagctacttgtggataaagagttgttgaagaagaagagctacgatgagattgagttagacgaaatggtaagagtagctttgttgtgcacacagtacctgccaggacatagaccaaaaatgtctgaagttgttcgaatgctggaaggagatggacttgcagagaaatgggaagcttctcaaagatcagacagtgtttcaaaatgtagcaacaggataaatgaattgatgtcatcttcagacagatactctgatcttaccgatgactctagtttacttgtgcaagcaatggagctctctggtcctagatga

SEQ ID NO: 238 - protein, 629 aa, Arabidopsis thaliana
MITRSFFCFLGFLCLLCSSVHGLLSPKGVNFEVQALMDIKASLHDPHGVLDNWDRDAVDPCSWTMVTCSSENFVIGLGTPSQNLSGTLSPSITNLTNLRIVLLQNNNITGKIPAEIGRLTRLETLDLSDNFFHGEIPFSVGYLQSLQYLRLNNNSLSGVFPLSLSNMTQLAFLDLSYNNLSGPVPRFAAKTFSIVGNPLICPTGTEPDCNGTTLIPMSMNLNQTGVPLYAGGSRNHKMAIAVGSSVGTVSLIFIAVGLFLWWRQRHNQNTFFDVKDGNHHEEVSLGNLRRFGFRELQIATNNFSSKNLLGKGGYGNVYKGILGDSTVIAVKRLKDGGALGGEIQFQTEVEMISLAVHRNLLRLYGFCITQTEKLLVYPYMSNGSVASRMKAKPVLDWSIRKRIAIGAARGLVYLHEQCDPKIIHRDVKAANILLDDYCEAVVGDFGLAKLLDHQDSHVTTAVRGTVGHIAPEYLSTGQSSEKTDVFGFGILLLELVTGQRAFEFGKAANQKGVMLDWVKKIHQEKKLELLVDKELLKKKSYDEIELDEMVRVALLCTQYLPGHRPKMSEVVRMLEGDGLAEKWEASQRSDSVSKCSNRINELMSSSDRYSDLTDDSSLLVQAMELSGPR

SEQ ID NO: 239 - DNA, 1842 bp, Arabidopsis thaliana
  CDS (1)..(1842)
atgagaatgttcagcttgcagaagatggctatggcttttactctcttgttttttgcctgtttatgctcatttgtgtctccagatgctcaaggggatgcactgtttgcgttgaggatctccttacgtgcattaccgaatcagctaagtgactggaatcagaaccaagttaatccttgcacttggtcccaagttatttgtgatgacaaaaactttgtcacttctcttacattgtcagatatgaacttctcgggaaccttgtcttcaagagtaggaatcctagaaaatctcaagactcttactttaaagggaaatggaattacgggtgaaataccagaagactttggaaatctgactagcttgactagtttggatttggaggacaatcagctaactggtcgtataccatccactatcggtaatctcaagaaacttcagttcttgaccttgagtaggaacaaacttaatgggactattccggagtcactcactggtcttccaaacctgttaaacctgctgcttgattccaatagtctcagtggtcagattcctcaaagtctgtttgagatcccaaaatataatttcacgtcaaacaacttgaattgtggcggtcgtcaacctcacccttgtgtatccgcggttgcccattcaggtgattcaagcaagcctaaaactggcattattgctggagttgttgctggagttacagttgttctctttggaatcttgttgtttctgttctgcaaggataggcataaaggatatagacgtgatgtgtttgtggatgttgcaggtgaagtggacaggagaattgcatttggacagttgaaaaggtttgcatggagagagctccagttagcgacagataacttcagcgaaaagaatgtacttggtcaaggaggctttgggaaagtttacaaaggagtgcttccggataacaccaaagttgctgtgaagagattgacggatttcgaaagtcctggtggagatgctgctttccaaagggaagtagagatgataagtgtagctgttcataggaatctactccgtcttatcgggttctgcaccacacaaacagaacgccttttggtttatcccttcatgcagaatctaagtcttgcacatcgtctgagagagatcaaagcaggcgacccggttctagattgggagacgaggaaacggattgccttaggagcagcgcgtggttttgagtatcttcatgaacattgcaatccgaagatcatacatcgtgatgtgaaagcagctaatgtgttactagatgaagattttgaagcagtggttggtgattttggtttagccaagctagtagatgttagaaggactaatgtgactactcaagttcgaggaacaatgggtcacattgcaccagagtatttatcaacagggaaatcatcagagagaaccgatgttttcgggtatggaattatgcttcttgagcttgttacaggacaacgcgcaatagacttttcacgtttggaggaagaagatgatgtcttgttacttgaccacgtgaagaaactggaaagagagaagagattaggagcaatcgtagataagaatttggatggagagtatataaaagaagaagtagggatgatgatacaagtggctttgctttgtacacaaggttcaccagaagaccgaccagtgatgtctgaagttgtgaggatgttagaaggagaagggcttgcggagagatgggaagagtggcaaaacgtggaagtcacgagacgtcatgagtttgaacggttgcagaggagatttgattggggtgaagattctatgcataaccaagatgccattgaattatctggtggaagatga

SEQ ID NO: 240 - protein, 613 aa, Arabidopsis thaliana
MRMFSLQKMAMAFTLLFFACLCSFVSPDAQGDALFALRISLRALPNQLSDWNQNQVNPCTWSQVICDDKNFVTSLTLSDMNFSGTLSSRVGILENLKTLTLKGNGITGEIPEDFGNLTSLTSLDLEDNQLTGRIPSTIGNLKKLQFLTLSRNKLNGTIPESLTGLPNLLNLLLDSNSLSGQIPQSLFEIPKYNFTSNNLNCGGRQPHPCVSAVAHSGDSSKPKTGIIAGVVAGVTVVLFGILLFLFCKDRHKGYRRDVFVDVAGEVDRRIAFGQLKRFAWRELQLATDNFSEKNVLGQGGFGKVYKGVLPDNTKVAVKRLTDFESPGGDAAFQREVEMISVAVHRNLLRLIGFCTTQTERLLVYPFMQNLSLAHRLREIKAGDPVLDWETRKRIALGAARGFEYLHEHCNPKIIHRDVKAANVLLDEDFEAVVGDFGLAKLVDVRRTNVTTQVRGTMGHIAPEYLSTGKSSERTDVFGYGIMLLELVTGQRAIDFSRLEEEDDVLLLDHVKKLEREKRLGAIVDKNLDGEYIKEEVGMMIQVALLCTQGSPEDRPVMSEVVRMLEGEGLAERWEEWQNVEVTRRHEFERLQRRFDWGEDSMHNQDAIELSGGR

SEQ ID NO: 241 - DNA, 1869 bp, Zea mays
  CDS (1)..(1869)
atggcggcgtcgctgaggtggtggtggtcggcggtggtattttcggtggtggtcggcgtgatcccggttgtcgccaacacggagggtgatgctctatacagcctacgacaaagcctgaaagataacaacaacgtgctgcagagttgggatccaactctggttaatccatgtacatggttccatgttacttgtaaccctgataacagtgtcatcagacttgatcttggaaatgcacaactatcaggtccattggtgccacagcttgggcaattgaaaaatatgcaatatctggaactttacagtaacaacataagtgggccaataccacctgaactggggaacttgactaacctggtcagtttggacctgtacctcaacaacttcactggcggtattcctgacaccttgggccaactatcaaagttgcggtttctccgtcttaataacaacagtctttctggtcaaattccgaaaaccttgaccaatatcaacactctccaagttctggatctatcaaacaacaatctctcgggaggggtgccatcaagcggttcgttttctctctttacacctataagttttgctaacaacccaaatctttgcggccctggtactacaaagccttgtcctggggctcctccattttctccaccccctccatacaatcccccagcaccaacttcatcaaaaggcgtgtccagcactggagcagtagctggaggcgttgcagctggcacagcgttgctgatcgcagtgcctgctattgggtacgcattgtggcggaggcgaaaacccgaagagcaattcttcgatgtccctgccgaggaggatcccgaagttcaccttggacagctcaagaggttctcgctgagagagctgcaagtcgccacggacaattttaacaacaggaatgtcctgggaagaggcggttttggaaaggtgtacaaagggagactaacggacggttcactggtagccgtgaagagattgaaggaggaacgcacccccggcggagagctccagttccaaacggaagttgaactgattagcatggcggtgcacaggaaccttctccggctccgtggattctgcatgacccctacagagcggctgctagtgtatccatacatggctaacgggagcgtcgcatcgcgccttcgagaacgcgcgccaaatgagccccccctcgaatgggaaacgagggctcggatcgcgctggggtcagccagaggcctgtcctacctgcacgaccactgcgatcccaagatcatccaccgcgacgtgaaggccgccaacatcctgctggacgaggacttcgaagccgtcgtgggtgacttcggcctggccaagctcatggactacaaggacacccacgtgacgaccgccgtccgtgggacgatcggccacatcgcccccgagtacctctccacggggaagtcctccgagaagacggacgtcttcggctacgggatcatgctcctggaactcatcaccgggcagagggcgttcgacctcgctcgtctcgcgaacgatgacgacgtcatgctccttgactgggtgaaggcgctgctgaaggagaagaagctggagcagctggtggacccggacctgcagggccggtacgtggaccaggaggtggagtcgctgatccaggtggcgctgctgtgcacgcagggctccccgatggagcggcccaagatgtcggaggtggcgcggatgctggagggcgacgggctggcggagcggtgggagcagtggcagaaggtggaggtgatgcggcaggaggcggagctcgccccgcgccacaacgactggatcgtcgactccacctacaacctcagggccgtcgaactgtccggcccgaggtag

SEQ ID NO: 242 - protein, 622 aa, Zea mays
MAASLRWWWSAVVFSVVVGVIPVVANTEGDALYSLRQSLKDNNNVLQSWDPTLVNPCTWFHVTCNPDNSVIRLDLGNAQLSGPLVPQLGQLKNMQYLELYSNNISGPIPPELGNLTNLVSLDLYLNNFTGGIPDTLGQLSKLRFLRLNNNSLSGQIPKTLTNINTLQVLDLSNNNLSGGVPSSGSFSLFTPISFANNPNLCGPGTTKPCPGAPPFSPPPPYNPPAPTSSKGVSSTGAVAGGVAAGTALLIAVPAIGYALWRRRKPEEQFFDVPAEEDPEVHLGQLKRFSLRELQVATDNFNNRNVLGRGGFGKVYKGRLTDGSLVAVKRLKEERTPGGELQFQTEVELISMAVHRNLLRLRGFCMTPTERLLVYPYMANGSVASRLRERAPNEPPLEWETRARIALGSARGLSYLHDHCDPKIIHRDVKAANILLDEDFEAVVGDFGLAKLMDYKDTHVTTAVRGTIGHIAPEYLSTGKSSEKTDVFGYGIMLLELITGQRAFDLARLANDDDVMLLDWVKALLKEKKLEQLVDPDLQGRYVDQEVESLIQVALLCTQGSPMERPKMSEVARMLEGDGLAERWEQWQKVEVMRQEAELAPRHNDWIVDSTYNLRAVELSGPR

SEQ ID NO: 243 - DNA, 1878 bp, Arabidopsis thaliana
  CDS (1)..(1878)
atggagtcgagttatgtggtgtttatcttactttcactgatcttacttccgaatcattcactgtggcttgcttctgctaatttggaaggtgatgctttgcatactttgagggttactctagttgatccaaacaatgtcttgcagagctgggatcctaggctagtgaatccttgcacatggttccatgtcacttgcaacaacgagaacagtgtcataagagttgatttggggaatgcagagttatctggccatttagttccagagcttggtgtgctcaagaatttgcagtatttggagctttacagtaacaacataactggcccgattcctagtaatcttggaaatctgacaaacttagtgagtttggatctttacttaaacagcttctccggtcctattccggaatcattgggaaagctttcaaagctgagatttctccggcttaacaacaacagtctcactgggtcaattcctatgtcactgaccaatattactacccttcaagtgttagatctatcaaataacagactctctggttcagttcctgacaatggctccttctcactcttcacacccatcagttttgctaataacttagacctatgtggacctgttacaagtcacccatgtcctggatctcccccgttttctcctccaccaccttttattcaacctcccccagtttccaccccgagtgggtatggtataactggagcaatagctggtggagttgctgcaggtgctgctttgctctttgctgctcctgcaatagcctttgcttggtggcgacgaagaaagccactagatattttcttcgatgtccctgccgaagaagatccagaagttcatctgggacagctcaagaggttttctttgcgggagctacaagtggcgagtgatgggtttagtaacaagaacattttgggcagaggtgggtttgggaaagtctacaagggacgcttggcagacggaactcttattgctgtcaagagactgaaggaagagcgaactccaggtggagagctccagtttcaaacagaagtagagatgataagtatggcagttcatcgaaacctgttgagattacgaggtttctgtatgacaccgaccgagagattgcttgtgtatccttacatggccaatggaagtgttgcttcgtgtctcagagagaggccaccgtcacaacctccgcttgattggccaacgcggaagagaatcgcgctaggctcagctcgaggtttgtcttacctacatgatcactgcgatccgaagatcattcaccgtgacgtaaaagcagcaaacatcctcttagacgaagaattcgaagcggttgttggagatttcgggttggcaaagctaatggactataaagacactcacgtgacaacagcagtccgtggcaccatcggtcacatcgctccagaatatctctcaaccggaaaatcttcagagaaaaccgacgttttcggatacggaatcatgcttctagaactaatcacaggacaaagagctttcgatctcgctcggctagctaacgacgacgacgtcatgttacttgactgggtgaaaggattgttgaaggagaagaagctagagatgttagtggatccagatcttcaaacaaactacgaggagagagaactggaacaagtgatacaagtggcgttgctatgcacgcaaggatcaccaatggaaagaccaaagatgtctgaagttgtaaggatgctggaaggagatgggcttgcggagaaatgggacgaatggcaaaaagttgagattttgagggaagagattgatttgagtcctaatcctaactctgattggattcttgattctacttacaatttgcacgccgttgagttatctggtccaaggtaa

SEQ ID NO: 244 - protein, 625 aa, Arabidopsis thaliana
MESSYVVFILLSLILLPNHSLWLASANLEGDALHTLRVTLVDPNNVLQSWDPRLVNPCTWFHVTCNNENSVIRVDLGNAELSGHLVPELGVLKNLQYLELYSNNITGPIPSNLGNLTNLVSLDLYLNSFSGPIPESLGKLSKLRFLRLNNNSLTGSIPMSLTNITTLQVLDLSNNRLSGSVPDNGSFSLFTPISFANNLDLCGPVTSHPCPGSPPFSPPPPFIQPPPVSTPSGYGITGAIAGGVAAGAALLFAAPAIAFAWWRRRKPLDIFFDVPAEEDPEVHLGQLKRFSLRELQVASDGFSNKNILGRGGFGKVYKGRLADGTLIAVKRLKEERTPGGELQFQTEVEMISMAVHRNLLRLRGFCMTPTERLLVYPYMANGSVASCLRERPPSQPPLDWPTRKRIALGSARGLSYLHDHCDPKIIHRDVKAANILLDEEFEAVVGDFGLAKLMDYKDTHVTTAVRGTIGHIAPEYLSTGKSSEKTDVFGYGIMLLELITGQRAFDLARLANDDDVMLLDWVKGLLKEKKLEMLVDPDLQTNYEERELEQVIQVALLCTQGSPMERPKMSEVVRMLEGDGLAEKWDEWQKVEILREEIDLSPNPNSDWILDSTYNLHAVELSGPR

SEQ ID NO: 245 - DNA, 1887 bp, Arabidopsis thaliana
  CDS (1)..(1887)
atggggagaaaaaagtttgaagcttttggttttgtctgcttaatctcactgcttcttctgtttaattcgttatggcttgcctcttctaacatggaaggtgatgcactgcacagtttgagagctaatctagttgatccatataatgtcttgcaaagctgggatcctacgcttgttaatccgtgtacttggtttcacgtaacgtgtaacaacgagaacagtgttataagagtcgatcttgggaatgcagacttgtctggtcagttggttcctcagctaggtcagctcaagaacttgcagtacttggagctttatagtaataacataaccgggccggttccaagcgatcttgggaatctgacaaacttagtgagcttggatctttacttgaacagcttcactggtccaattccagattctctaggaaagctattcaagcttcgctttcttcggctcaacaataacagtctcaccggaccaattcccatgtcattgactaatatcacgacccttcaagttttggatctgtcgaacaaccgattatctggatctgttcctgataatggttccttctcgctcttcactcccatcagttttgctaacaacttggatctatgcggcccagttactagccgtccttgtcctggatctcccccgttttctcctccaccaccttttataccacctcccatagttcctacaccaggtgggtatagtgctactggagccattgcgggaggagttgctgctggtgctgctttactatttgctgcccctgctttagcttttgcatggtggcgtagaagaaaacctcaagaattcttctttgatgttcctgccgaagaggaccctgaggttcacttggggcagcttaagcggttctctctacgggaacttcaagtagcaacggatagcttcagcaacaagaacattttgggccgaggtgggtttggaaaagtctacaaaggccgtcttgctgatggaacacttgttgcagtcaaacggcttaaagaagagcgcaccccaggtggcgagctccagtttcagacagaagtggagatgataagcatggctgttcacagaaatctcctcaggctacgcggtttctgtatgacccctacggagagattgcttgtttatccttacatggctaatggaagtgtcgcttcctgtttgagagaacgtccaccgtcacagttgcctctagcctggtcaataagacagcaaatcgcgctaggatcagcgaggggtttgtcttatcttcatgatcattgtgaccccaaaattattcaccgtgatgtgaaagctgctaatattctgttggacgaggaatttgaggcggtggtaggtgatttcgggttagctaggcttatggattataaagatacacatgtcacaacggctgtgcgtggaactattggacacattgctcctgagtatctctcaactggaaaatcttcagagaaaaccgatgttttcggctacgggatcatgcttttggaactgattacaggtcaaagagcttttgatcttgcaagactggcgaatgacgatgacgttatgctcctagattgggtgaaaggacttttgaaggagaagaaactggagatgcttgtggatcctgatctgcagggcaattacacagaagcagaagtagaacagctcatacaagtggctcttctctgcacacagagctcacctatggaacgacctaagatgtctgaggttgttcgaatgcttgaaggtgacggtttagcggagaaatgggacgagtggcagaaagtggaagttctcaggcaagaagtagagctctcttctcaccccacctctgactggatccttgattcgactgataatctacatgctatggagttgtctggtccaagataa

SEQ ID NO: 246 - protein, 628 aa, Arabidopsis thaliana
MGRKKFEAFGFVCLISLLLLFNSLWLASSNMEGDALHSLRANLVDPYNVLQSWDPTLVNPCTWFHVTCNNENSVIRVDLGNADLSGQLVPQLGQLKNLQYLELYSNNITGPVPSDLGNLTNLVSLDLYLNSFTGPIPDSLGKLFKLRFLRLNNNSLTGPIPMSLTNITTLQVLDLSNNRLSGSVPDNGSFSLFTPISFANNLDLCGPVTSRPCPGSPPFSPPPPFIPPPIVPTPGGYSATGAIAGGVAAGAALLFAAPALAFAWWRRRKPQEFFFDVPAEEDPEVHLGQLKRFSLRELQVATDSFSNKNILGRGGFGKVYKGRLADGTLVAVKRLKEERTPGGELQFQTEVEMISMAVHRNLLRLRGFCMTPTERLLVYPYMANGSVASCLRERPPSQLPLAWSIRQQIALGSARGLSYLHDHCDPKIIHRDVKAANILLDEEFEAVVGDFGLARLMDYKDTHVTTAVRGTIGHIAPEYLSTGKSSEKTDVFGYGIMLLELITGQRAFDLARLANDDDVMLLDWVKGLLKEKKLEMLVDPDLQGNYTEAEVEQLIQVALLCTQSSPMERPKMSEVVRMLEGDGLAEKWDEWQKVEVLRQEVELSSHPTSDWILDSTDNLHAMELSGPR

SEQ ID NO: 247 - DNA, 1881 bp, Zea mays
  CDS (1)..(1881)
  misc_feature (45)..(45): n is a, g, c or t
  misc_feature (763)..(763): r is g or a
  misc_feature (1141)..(1141): r is g or a
  misc_feature (1247)..(1247): y is t or c
atggcggcgtcggcgtcggctgggaggtggtgggcggtggtcctngcggtcgcggtgctgctcgggccgggacgggtcgtcgccaacaccgagggtgatgccctgtacagcctgcgtcagagcttgaaagatgctaacaatgtcttgcagagttgggatcccactcttgttaatccatgtacatggttccatgttacgtgtaacaacgataacagtgttatcagagttgaccttggaaatgcacaattatctggcgttctagtgccacaacttggccagctgaaaaatctccaatatttggagctttacagcaacaacataagtgggacaataccccctgaactggggaacctgactaacctggtcagtttggatctgtatatgaacaacttctctggcaatatccctgacagcctggggaatctagtgaagctgcgtttcctacgtcttaacaacaatagcttggttggtccgattcccgtatccttgaccaatatctccactctccaagtactggatctctcgaacaacaacctctcaggacaagtcccatcgactggctccttttcactcttcacccctataagttttgccaacaatccaaatctttgtggccctggtacttcgaagccctgccctggggctcctcccttttccccacctcctccattcaatcctccatctcccccaactcaatctactggtgcttctagcactggagcaatagctggaggtgttgctgctggtgcagcattggtgtttrctgttcctgcaattgcatttgcaatgtggcgccgtcgtaaacctgaagagcatttcttcgatgttcctgccgaggaggatccagaagtccatcttggtcagctcaaaaagttttcattgcgggagcttcaagttgcaactgataatttcagtaacaagaacattttaggaagaggcggttttggaaaagtgtacaaaggaaggcttgctgatggctcattggtagcagtgaaaagactaaaagaggagcgtacacctggtggtgagcttcagttccaaacagaggttgagatgattagcatggcggtgcacaagaaccttctccgacttcgtggtttctgcatgacacctactgaaaggttgttagtctacccatacrtggctaacgggagtgtggcatcacgtttacgagagcggcagccatctgagccacctcttagctgggaaccaagaagacggattgcactgggatctgcaagaggacyttcttacttgcatgatcactgcgatcccaaaatcatccatcgggatgtcaaagctgcaaatattcttttggatgaggacttcgaggcagttgtgggtgatttcgggcttgccaagcttatggactacaaggatacccatgtcacaacagctgttcgtggaacaattgggcacattgctcccgagtacctatctaccggcaagtcttctgagaagactgatgtttttggctatgggatcatgcttctggagcttattactggccagagggcatttgatctagctcgtcttgcaaatgatgacgatgttatgcttcttgactgggtgaaaggactgttgaaggagaagaaggtggagatgctggtggacccagatctgcagaaagcctacgaggaggtcgaggtggagagccttattcaggtggcactcctctgcacgcagggctcccccctggaccgtccaaagatgtcggaggtggtgaggatgctcgaaggtgacgggctggcagagcgttgggacgaatggcagaaagtagaggtggtgaggcaggaggctgagtcggcaccgctccgcaatgactggatcgtcgattccacgtacaaccttcgtgccgtggagctgtccggcccaaggtag

SEQ ID NO: 248 - protein, 626 aa, Zea mays
  misc_feature (255)..(255): The Xaa at location 255 stands for Ala, or Thr.
  misc_feature (381)..(381): The Xaa at location 381 stands for Met, or Val.
  misc_feature (416)..(416): The Xaa at location 416 stands for Leu, or Pro.
MAASASAGRWWAVVLAVAVLLGPGRVVANTEGDALYSLRQSLKDANNVLQSWDPTLVNPCTWFHVTCNNDNSVIRVDLGNAQLSGVLVPQLGQLKNLQYLELYSNNISGTIPPELGNLTNLVSLDLYMNNFSGNIPDSLGNLVKLRFLRLNNNSLVGPIPVSLTNISTLQVLDLSNNNLSGQVPSTGSFSLFTPISFANNPNLCGPGTSKPCPGAPPFSPPPPFNPPSPPTQSTGASSTGAIAGGVAAGAALVFXVPAIAFAMWRRRKPEEHFFDVPAEEDPEVHLGQLKKFSLRELQVATDNFSNKNILGRGGFGKVYKGRLADGSLVAVKRLKEERTPGGELQFQTEVEMISMAVHKNLLRLRGFCMTPTERLLVYPYXANGSVASRLRERQPSEPPLSWEPRRRIALGSARGXSYLHDHCDPKIIHRDVKAANILLDEDFEAVVGDFGLAKLMDYKDTHVTTAVRGTIGHIAPEYLSTGKSSEKTDVFGYGIMLLELITGQRAFDLARLANDDDVMLLDWVKGLLKEKKVEMLVDPDLQKAYEEVEVESLIQVALLCTQGSPLDRPKMSEVVRMLEGDGLAERWDEWQKVEVVRQEAESAPLRNDWIVDSTYNLRAVELSGPR

SEQ ID NO: 249 - DNA, 1881 bp, Zea mays
  CDS (1)..(1881)
atggcggcgtcggcgtcggctgggaggtggtgggcggtggtccttgcggtcgcggtgctgctagggccgggacaggtcgtcgccaacaccgagggtgatgccctgtacagcctgcgtcagagcttgaaagatgctaacaatgtcttgcagagttgggatcccactcttgttaatccatgtacatggttccatgttacgtgtaacaacgataacagtgttatcagagttgaccttggaaatgcacaattatctggcgttctagtgccacaacttggccagctgaaaaatctccaatatttggagctttacagcaacaacataagtgggacaataccccctgaactggggaacctgactaacctggtcagtttggatctgtatatgaacaacttctctggcaatatccctgacagcctggggaatctagtgaagctgcgtttcctacgtcttaacaacaatagcttggttggcccgattcccgtatccttgaccaatatctccactctccaagtactggatctctcgaacaacaacctctcaggacaagtcccatcgactggctccttttcactcttcacccctataagttttgccaacaatccaaatctttgtggccctggtacttcgaagccctgccctggggctcctcccttttccccacctcctccattcaatcctccatctcccccaactcaatctactggtgcttctagcactggagcaatagctggaggtgttgctgctggtgcagcattggtgtttgctgttcctgcaattgcatttgcaatgtggcgccgtcgtaaacctgaagagcatttcttcgatgttcctgccgaggaggatccagaagtccatcttggtcagctcaaaaagttttcattgcgggagcttcaagttgcaactgataatttcagtaacaagaacattttaggaagaggcggttttggaaaagtgtacaaaggaaggcttgctgatggctcattggtagcagtgaaaagactaaaagaggagcgtacacctggtggtgagcttcagttccaaacagaggttgagatgattagcatggcggtgcacaagaaccttctccgacttcgtggtttctgcatgacacctactgaaaggttgttagtctacccatacatggctaacgggagtgtggcatcacgtttacgagagcggcagccatctgagccacctcttagctgggaaccaagaagacggattgcactgggatctgcaagaggactttcttacttgcatgatcactgcgatcccaaaatcatccatcgggatgtcaaagctgcaaatattcttttggatgaggacttcgaggcagttgtgggtgatttcgggcttgccaagcttatggactacaaggatacccatgtcacaacagctgttcgtggaacaattgggcacattgctcccgagtacctatctaccggcaagtcttctgagaagactgatgtttttggctatgggatcatgcttctggagcttattactggccagagggcatttgatctagctcgtcttgcaaatgatgacgatgttatgcttcttgactgggtgaaaggactgttgaaggagaagaaggtggagatgctggtggacccagatctgcagaaagcctacgaggaggtcgaggtggagagccttattcaggtggcactcctctgcacgcagggctcccccctggaccgtccaaagatgtcggaggtggtgaggatgctcgaaggtgacgggctggcagagcgttgggacgaatggcagaaagtagaggtggtgaggcaggaggctgagtcggcaccgctccgcaatgactggatcgtcgattccacgtacaaccttcgtgccgtggagctgtccggcccaaggtag

SEQ ID NO: 250 - protein, 626 aa, Zea mays
MAASASAGRWWAVVLAVAVLLGPGQVVANTEGDALYSLRQSLKDANNVLQSWDPTLVNPCTWFHVTCNNDNSVIRVDLGNAQLSGVLVPQLGQLKNLQYLELYSNNISGTIPPELGNLTNLVSLDLYMNNFSGNIPDSLGNLVKLRFLRLNNNSLVGPIPVSLTNISTLQVLDLSNNNLSGQVPSTGSFSLFTPISFANNPNLCGPGTSKPCPGAPPFSPPPPFNPPSPPTQSTGASSTGAIAGGVAAGAALVFAVPAIAFAMWRRRKPEEHFFDVPAEEDPEVHLGQLKKFSLRELQVATDNFSNKNILGRGGFGKVYKGRLADGSLVAVKRLKEERTPGGELQFQTEVEMISMAVHKNLLRLRGFCMTPTERLLVYPYMANGSVASRLRERQPSEPPLSWEPRRRIALGSARGLSYLHDHCDPKIIHRDVKAANILLDEDFEAVVGDFGLAKLMDYKDTHVTTAVRGTIGHIAPEYLSTGKSSEKTDVFGYGIMLLELITGQRAFDLARLANDDDVMLLDWVKGLLKEKKVEMLVDPDLQKAYEEVEVESLIQVALLCTQGSPLDRPKMSEVVRMLEGDGLAERWDEWQKVEVVRQEAESAPLRNDWIVDSTYNLRAVELSGPR

SEQ ID NO: 251 - DNA, 1740 bp, Arabidopsis thaliana
  CDS (1)..(1740)
atggccttagcttttgtgggaatcacttcgtcaacaactcaaccagatatcgaaggaggagctctgttgcagctcagagattcgcttaatgattcgagcaatcgtctaaaatggacacgcgattttgtgagcccttgctatagttggtcttatgttacctgcagaggccagagtgttgtggctctaaatcttgcctcgagtggattcacaggaacactctctccagctattacaaaactgaagttcttggttaccttagagttacagaacaatagtttatctggtgccttaccagattctcttgggaacatggttaatctacagactttaaacctatcagtgaatagtttcagcggatcgataccagcgagctggagtcagctctcgaatctaaagcacttggatctctcatccaataatttaacaggaagcatcccaacacaattcttctcaatcccaacattcgatttttcaggaactcagcttatatgcggtaaaagtttgaatcagccttgttcttcaagttctcgtcttccagtcacatcctccaagaaaaagctgagagacattactttgactgcaagttgtgttgcttctataatcttattccttggagcaatggttatgtatcatcaccatcgcgtccgcagaaccaaatacgacatcttttttgatgtagctggggaagatgacaggaagatttcctttggacaactaaaacgattctctttacgtgaaatccagctcgcaacagatagtttcaacgagagcaatttgataggacaaggaggatttggtaaagtatacagaggtttgcttccagacaaaacaaaagttgcagtgaaacgccttgcggattacttcagtcctggaggagaagctgctttccaaagagagattcagctcataagcgttgcggttcataaaaatctcttacgccttattggcttctgcacaacttcctctgagagaatccttgtttatccatacatggaaaatcttagtgttgcatatcgactaagagatttgaaagcgggagaggaaggattagactggccaacaaggaagcgtgtagcttttggttcagctcacggtttagagtatctacacgaacattgtaacccgaagatcatacaccgcgatctcaaggctgcaaacatacttttagacaacaattttgagccagttcttggagatttcggtttagctaagcttgtggacacatctctgactcatgtcacaactcaagtccgaggcacaatgggtcacattgcgccagagtatctctgcacaggaaaatcatctgaaaaaaccgatgtttttggttacggtataacgcttcttgagcttgttactggtcagcgcgcaatcgatttttcacgcttggaagaagaggaaaatattctcttgcttgatcatataaagaagttgcttagagaacagagacttagagacattgttgatagcaatttgactacatatgactccaaagaagttgaaacaatcgttcaagtggctcttctctgcacacaaggctcaccagaagatagaccagcgatgtctgaagtggtcaaaatgcttcaagggactggtggtttggctgagaaatggactgaatgggaacaacttgaagaagttaggaacaaagaagcattgttgcttccgactttaccggctacttgggatgaagaagaaaccaccgttgatcaagaatctatccgattatcgacagcaagatga

SEQ ID NO: 252 - protein, 579 aa, Arabidopsis thaliana
MALAFVGITSSTTQPDIEGGALLQLRDSLNDSSNRLKWTRDFVSPCYSWSYVTCRGQSVVALNLASSGFTGTLSPAITKLKFLVTLELQNNSLSGALPDSLGNMVNLQTLNLSVNSFSGSIPASWSQLSNLKHLDLSSNNLTGSIPTQFFSIPTFDFSGTQLICGKSLNQPCSSSSRLPVTSSKKKLRDITLTASCVASIILFLGAMVMYHHHRVRRTKYDIFFDVAGEDDRKISFGQLKRFSLREIQLATDSFNESNLIGQGGFGKVYRGLLPDKTKVAVKRLADYFSPGGEAAFQREIQLISVAVHKNLLRLIGFCTTSSERILVYPYMENLSVAYRLRDLKAGEEGLDWPTRKRVAFGSAHGLEYLHEHCNPKIIHRDLKAANILLDNNFEPVLGDFGLAKLVDTSLTHVTTQVRGTMGHIAPEYLCTGKSSEKTDVFGYGITLLELVTGQRAIDFSRLEEEENILLLDHIKKLLREQRLRDIVDSNLTTYDSKEVETIVQVALLCTQGSPEDRPAMSEVVKMLQGTGGLAEKWTEWEQLEEVRNKEALLLPTLPATWDEEETTVDQESIRLSTAR

SEQ ID NO: 253 - DNA, 1713 bp, Arabidopsis thaliana
  CDS (1)..(1713)
atggagatttctttgatgaagtttctgtttttaggaatctgggtttattattactctgttcttgactctgtttctgccatggatagtcttttatctcccaagggtgttaactatgaagtggctgcgttaatgtcagtgaagaacaagatgaaagatgagaaagaggttttgtctggttgggatattaactctgttgatccttgtacttggaacatggttggttgttcttctgaaggttttgtggtttctctgttacttcagaataatcagttaactggtccgattccttctgagttaggccaactctctgagcttgaaacgcttgatttatcggggaatcggtttagtggtgaaatcccagcttctttagggttcttaactcacttaaactacttgcggcttagcaggaatcttttatctgggcaagtccctcacctcgtcgctggcctctcaggtctttctttcttgattgtaggaaatgcatttctttgtggtccagcttcccaagagctttgctcagatgctacacctgtgagaaatgcgacgggtttgtctgaaaaggacaatagcaaacatcacagcttagtgctctcttttgcatttggcattgttgttgcctttatcatctccctaatgtttctcttcttctgggtgctttggcatcgatcacgtctctcaagatcacacgtgcagcaagactacgaatttgaaatcggccatctgaaaaggttcagttttcgcgaaatacaaaccgcaacaagcaattttagtccaaagaacattttgggacaaggagggtttgggatggtttataaagggtatctcccaaatggaactgtggtggcagttaaaagattgaaagatccgatttatacaggagaagttcagtttcaaaccgaagtagagatgattggcttagctgttcaccgtaaccttttacgcctctttggattctgtatgaccccggaagagagaatgcttgtgtatccgtacatgccaaatggaagcgtagctgatcgtctgagagacaattatggagaaaagccgtctctagattggaatcggaggataagcattgcactcggcgcagctcgaggacttgtttacttgcacgagcaatgcaatccaaagattattcacagagacgtcaaagctgcaaatattctacttgatgagagctttgaagcaatagttggcgattttggtctagcaaagcttttagaccagagagattcacatgtcactaccgcagtccgaggaaccattggacacatcgctcccgagtacctttccactggacagtcctcagagaaaaccgatgttttcggattcggagtactaatccttgaactcataacaggtcataagatgattgatcaaggcaatggtcaagttcgaaaaggaatgatattgagctgggtaaggacattgaaagcagagaagagatttgcagagatggtggacagagatttgaagggagagtttgatgatttggtgttggaggaagtagtggaattggctttgctttgtacacagccacatccgaatctaagaccgaggatgtctcaagtgttgaaggtactagaaggtttagtggaacagtgtgaaggagggtatgaagctagagctccaagtgtctctaggaactacagtaatggtcatgaagagcagtcctttattattgaagccattgagctctctggaccacgatga

SEQ ID NO: 254 - protein, 570 aa, Arabidopsis thaliana
MEISLMKFLFLGIWVYYYSVLDSVSAMDSLLSPKGVNYEVAALMSVKNKMKDEKEVLSGWDINSVDPCTWNMVGCSSEGFVVSLLLQNNQLTGPIPSELGQLSELETLDLSGNRFSGEIPASLGFLTHLNYLRLSRNLLSGQVPHLVAGLSGLSFLIVGNAFLCGPASQELCSDATPVRNATGLSEKDNSKHHSLVLSFAFGIVVAFIISLMFLFFWVLWHRSRLSRSHVQQDYEFEIGHLKRFSFREIQTATSNFSPKNILGQGGFGMVYKGYLPNGTVVAVKRLKDPIYTGEVQFQTEVEMIGLAVHRNLLRLFGFCMTPEERMLVYPYMPNGSVADRLRDNYGEKPSLDWNRRISIALGAARGLVYLHEQCNPKIIHRDVKAANILLDESFEAIVGDFGLAKLLDQRDSHVTTAVRGTIGHIAPEYLSTGQSSEKTDVFGFGVLILELITGHKMIDQGNGQVRKGMILSWVRTLKAEKRFAEMVDRDLKGEFDDLVLEEVVELALLCTQPHPNLRPRMSQVLKVLEGLVEQCEGGYEARAPSVSRNYSNGHEEQSFIIEAIELSGPR

SEQ ID NO: 255 - DNA, 1923 bp, Oryza sativa
  CDS (1)..(1923)
atggagccgcccttcttcctcctcctgctgctgctcgtggtctcctcctcctccccttccgccgccctcctctccgccaagggcgtcaacaacgaagtgcaagctctgattgtgatcaagaacctgctcaaggacccccatggcgtgctcaagagctgggaccagaactccgtcgacccctgcagctgggccatgatcacctgctccccggatttcctcgtcactggcctggaagctccaagccagcatctctctggcctgctctcaccaagcatcggcaacctgaccaatcttgagactgttctcctgcagaacaacaacataaccgggccaatcccagcagagattggcaggctggagaacctcaagacgcttgatctctccagcaacagcttctatggcgaaatccccagctctgtgggccacctcgagagcctccagtacttgaggctcaacaacaacaccctgtctggtccattcccttctgcatcagctaacctgtcacaccttgttttcctagatttgtcatataacaacctgagtggcccgattccagaatcattggcaagaacttacaacatagtggggaatcccctcatctgcgacgccaacagggagcaggattgctacgggacggcgccgatgccgatgagctacagcctgaacggctcgcggggcggcgcgctgccgccggcggcgagggacagggggcacaagttcgccgtcgcgttcggctccaccgccggctgcatgggcctcctcctcctcgccgccggtttcctcttctggtggcgccaccgccgcaaccggcagatcctctttgacgtcgacgagcagcagattgagaacgtgaacctggggaacgtgaagaggttcagcttcagggagctgcaggcggcgacggaggggttcagcgggaagaacatcctggggaaaggagggttcgggaacgtgtacagggggcagctccccgacgggacgctggtggcggtgaagcggctcaaggacggcaacgcggccggcggcgaggcccagttccagacggaggtggagatgatcagcctcgccctccaccgcaacctcctccgcctctacggcttctgcatgaccgccaccgagcgcctcctagtctaccccttcatgtccaacggcagcgtcgcctcccgcctcaaagcgaagccggcgttggagtgggggacgaggaggaggatcgcggtgggggcggcgaggggcctggtgtacctgcacgagcagtgcgaccccaagatcatccaccgcgacgtcaaggccgccaacgtgctgctggacgaggcgtgcgaggccgtcgtcggcgacttcgggctggccaagctgctggaccaccgggagtcgcacgtcaccacggcggtgcggggcaccgtcggccacatcgcgccggagtacctgtccacggggcagtcgtcggaccggaccgacgtcttcggcttcggcatcctgctgctggagctcgtcaccggccagacggcgctcgagttcggcaagtcgtccaaccacaagggcgccatgctggactgggtgaagaagatgcagtcggagaagaaggtggaggtgctggtggacaaggggttaggcggagggtacgaccgggtggaggtggaggagatggtgcaggtggctctcctctgcacccagtacctccccgcccaccgcccccgcatgtccgacgtcgtccgcatgctcgagggcgacggcctcgccgaccgctgggagaaggcctccggccactccaccgccgccgccgactccctctcccactcccaccgcacctcagacccggcgccgcccgccgccgacttcgccgccgccttcggccgctgcttctccgacctcaccgacgactcctccctcctcgtccaggccgtcgagctctccggccccagataa

SEQ ID NO: 256 - protein, 640 aa, Oryza sativa
MEPPFFLLLLLLVVSSSSPSAALLSAKGVNNEVQALIVIKNLLKDPHGVLKSWDQNSVDPCSWAMITCSPDFLVTGLEAPSQHLSGLLSPSIGNLTNLETVLLQNNNITGPIPAEIGRLENLKTLDLSSNSFYGEIPSSVGHLESLQYLRLNNNTLSGPFPSASANLSHLVFLDLSYNNLSGPIPESLARTYNIVGNPLICDANREQDCYGTAPMPMSYSLNGSRGGALPPAARDRGHKFAVAFGSTAGCMGLLLLAAGFLFWWRHRRNRQILFDVDEQQIENVNLGNVKRFSFRELQAATEGFSGKNILGKGGFGNVYRGQLPDGTLVAVKRLKDGNAAGGEAQFQTEVEMISLALHRNLLRLYGFCMTATERLLVYPFMSNGSVASRLKAKPALEWGTRRRIAVGAARGLVYLHEQCDPKIIHRDVKAANVLLDEACEAVVGDFGLAKLLDHRESHVTTAVRGTVGHIAPEYLSTGQSSDRTDVFGFGILLLELVTGQTALEFGKSSNHKGAMLDWVKKMQSEKKVEVLVDKGLGGGYDRVEVEEMVQVALLCTQYLPAHRPRMSDVVRMLEGDGLADRWEKASGHSTAAADSLSHSHRTSDPAPPAADFAAAFGRCFSDLTDDSSLLVQAVELSGPR

SEQ ID NO: 257 - DNA, 1818 bp, Arabidopsis thaliana
  CDS (1)..(1818)
atggctatggcttttactctcttgttttttgcctgtttatgctcatttgtgtctccagatgctcaaggggatgcactgtttgcgttgaggatctccttacgtgcattaccgaatcagctaagtgactggaatcagaaccaagttaatccttgcacttggtcccaagttatttgtgatgacaaaaactttgtcacttctcttacattgtcagatatgaacttctcgggaaccttgtcttcaagagtaggaatcctagaaaatctcaagactcttactttaaagggaaatggaattacgggtgaaataccagaagactttggaaatctgactagcttgactagtttggatttggaggacaatcagctaactggtcgtataccatccactatcggtaatctcaagaaacttcagttcttgaccttgagtaggaacaaacttaatgggactattccggagtcactcactggtcttccaaacctgttaaacctgctgcttgattccaatagtctcagtggtcagattcctcaaagtctgtttgagatcccaaaatataatttcacgtcaaacaacttgaattgtggcggtcgtcaacctcacccttgtgtatccgcggttgcccattcaggtgattcaagcaagcctaaaactggcattattgctggagttgttgctggagttacagttgttctctttggaatcttgttgtttctgttctgcaaggataggcataaaggatatagacgtgatgtgtttgtggatgttgcaggtgaagtggacaggagaattgcatttggacagttgaaaaggtttgcatggagagagctccagttagcgacagataacttcagcgaaaagaatgtacttggtcaaggaggctttgggaaagtttacaaaggagtgcttccggataacaccaaagttgctgtgaagagattgacggatttcgaaagtcctggtggagatgctgctttccaaagggaagtagagatgataagtgtagctgttcataggaatctactccgtcttatcgggttctgcaccacacaaacagaacgccttttggtttatcccttcatgcagaatctaagtcttgcacatcgtctgagagagatcaaagcaggcgacccggttctagattgggagacgaggaaacggattgccttaggagcagcgcgtggttttgagtatcttcatgaacattgcaatccgaagatcatacatcgtgatgtgaaagcagctaatgtgttactagatgaagattttgaagcagtggttggtgattttggtttagccaagctagtagatgttagaaggactaatgtgactactcaagttcgaggaacaatgggtcacattgcaccagaatatttatcaacagggaaatcatcagagagaaccgatgttttcgggtatggaattatgcttcttgagcttgttacaggacaacgcgcaatagacttttcacgtttggaggaagaagatgatgtcttgttacttgaccacgtgaagaaactggaaagagagaagagattaggagcaatcgtagataagaatttggatggagagtatataaaagaagaagtagagatgatgatacaagtggctttgctttgtacacaaggttcaccagaagaccgaccagtgatgtctgaagttgtgaggatgttagaaggagaagggcttgcggagagatgggaagagtggcaaaacgtggaagtcacgagacgtcatgagtttgaacggttgcagaggagatttgattggggtgaagattctatgcataaccaagatgccattgaattatctggtggaagatga

SEQ ID NO: 258 - protein, 605 aa, Arabidopsis thaliana
MAMAFTLLFFACLCSFVSPDAQGDALFALRISLRALPNQLSDWNQNQVNPCTWSQVICDDKNFVTSLTLSDMNFSGTLSSRVGILENLKTLTLKGNGITGEIPEDFGNLTSLTSLDLEDNQLTGRIPSTIGNLKKLQFLTLSRNKLNGTIPESLTGLPNLLNLLLDSNSLSGQIPQSLFEIPKYNFTSNNLNCGGRQPHPCVSAVAHSGDSSKPKTGIIAGVVAGVTVVLFGILLFLFCKDRHKGYRRDVFVDVAGEVDRRIAFGQLKRFAWRELQLATDNFSEKNVLGQGGFGKVYKGVLPDNTKVAVKRLTDFESPGGDAAFQREVEMISVAVHRNLLRLIGFCTTQTERLLVYPFMQNLSLAHRLREIKAGDPVLDWETRKRIALGAARGFEYLHEHCNPKIIHRDVKAANVLLDEDFEAVVGDFGLAKLVDVRRTNVTTQVRGTMGHIAPEYLSTGKSSERTDVFGYGIMLLELVTGQRAIDFSRLEEEDDVLLLDHVKKLEREKRLGAIVDKNLDGEYIKEEVEMMIQVALLCTQGSPEDRPVMSEVVRMLEGEGLAERWEEWQNVEVTRRHEFERLQRRFDWGEDSMHNQDAIELSGGR

SEQ ID NO: 259 - DNA, 1893 bp, Arabidopsis thaliana
  CDS (1)..(1893)
atgttgcaaggaagaagagaagcaaaaaagagttatgctttgttctcttcaactttcttcttcttctttatctgttttctttcttcttcttctgcagaactcacagacaaaggtgttaactttgaaggaatcaaaagctcactgactgatcctcatggagttctaatgaattgggatgacacagcagttgatccatgtagctggaacatgatcacttgttctgatggttttgtcataaggctagaagctccaagccaaaacttatcaggaactctttcatcaagtattggaaatttaacaaatcttcaaactgtgttattgcagaacaattacataacaggaaacatccctcatgagattgggaaattgatgaaactcaaaacacttgatctctctaccaataacttcactggtcaaatcccattcactctttcttactccaaaaatcttcagtacttgagggttaataataacagcctgacaggaacaattcctagctcattggcaaacatgacccaactcacttttttggatttgtcgtataataacttgagtggaccagttccaagatcacttgccaaaacattcaatgttatgggcaattctcagatttgtccaacaggaactgagaaagactgtaatgggactcagcctaagccaatgtcaatcaccttgaacagttctcaaaataaatcatctgatggaggaactaaaaaccggaaaatcgcggtagtcttcggtgtaagcttgacatgtgtttgcttgttgatcattggctttggttttcttctttggtggagaagaagacataacaaacaagtattattctttgacattaatgagcaaaacaaggaagaaatgtgtctagggaatctaaggaggtttaatttcaaagaacttcaatccgcaactagtaacttcagcagcaagaatctggtcggaaaaggagggtttggaaatgtgtataaaggttgtcttcatgatggaagtatcatcgcggtgaagagattaaaggatataaacaatggtggtggagaggttcagtttcagacagagcttgaaatgataagccttgccgtccaccggaatctcctccgcttatacggtttctgtactacttcctctgaacggcttctcgtttatccttacatgtccaatggcagtgtcgcttctcgtctcaaagctaaaccggtattggattggggcacaagaaagcgaatagcattaggagcaggaagagggttgctgtatttgcatgagcaatgtgatccaaagatcattcaccgtgatgtcaaagctgcgaacatacttcttgacgattactttgaagctgttgtcggagatttcgggttggctaagcttttggatcatgaggagtcgcatgtgacaaccgccgtgagaggaacagtgggtcacattgcacctgagtatctctcaacaggacaatcttctgagaagacagatgtgttcggtttcgggattcttcttctcgaattgattactggattgagagctcttgaattcggaaaagcagcaaaccaaagaggagcgatacttgattgggtaaagaaactacaacaagagaagaagctagaacagatagtagacaaggatttgaagagcaactacgatagaatagaagtggaagaaatggttcaagtggctttgctttgtacacagtatcttcccattcaccgtcctaagatgtctgaagttgtgagaatgcttgaaggcgatggtcttgttgagaaatgggaagcttcttctcagagagcagaaaccaatagaagttacagtaaacctaacgagttttcttcctctgaacgttattcggatcttacagatgattcctcggtgctggttcaagccatggagttatcaggtccaagatga

SEQ ID NO: 260 - protein, 630 aa, Arabidopsis thaliana
MLQGRREAKKSYALFSSTFFFFFICFLSSSSAELTDKGVNFEGIKSSLTDPHGVLMNWDDTAVDPCSWNMITCSDGFVIRLEAPSQNLSGTLSSSIGNLTNLQTVLLQNNYITGNIPHEIGKLMKLKTLDLSTNNFTGQIPFTLSYSKNLQYLRVNNNSLTGTIPSSLANMTQLTFLDLSYNNLSGPVPRSLAKTFNVMGNSQICPTGTEKDCNGTQPKPMSITLNSSQNKSSDGGTKNRKIAVVFGVSLTCVCLLIIGFGFLLWWRRRHNKQVLFFDINEQNKEEMCLGNLRRFNFKELQSATSNFSSKNLVGKGGFGNVYKGCLHDGSIIAVKRLKDINNGGGEVQFQTELEMISLAVHRNLLRLYGFCTTSSERLLVYPYMSNGSVASRLKAKPVLDWGTRKRIALGAGRGLLYLHEQCDPKIIHRDVKAANILLDDYFEAVVGDFGLAKLLDHEESHVTTAVRGTVGHIAPEYLSTGQSSEKTDVFGFGILLLELITGLRALEFGKAANQRGAILDWVKKLQQEKKLEQIVDKDLKSNYDRIEVEEMVQVALLCTQYLPIHRPKMSEVVRMLEGDGLVEKWEASSQRAETNRSYSKPNEFSSSERYSDLTDDSSVLVQAMELSGPR

SEQ ID NO: 261 - DNA, 1722 bp, Arabidopsis thaliana
  CDS (1)..(1722)
atgaagattcaaattcatctcctttactcgttcttgttcctctgtttctctactctcactctatcttctgagcccagaaaccctgaagttgaggcgttgataagtataaggaacaatttgcatgatcctcatggagctttgaacaattgggacgagttttcagttgatccttgtagctgggctatgatcacttgctctcccgacaacctcgtcattggactaggagcgccgagccagtctctctcgggaggtttatctgagtctatcggaaatctcacaaatctccgacaagtgtcattgcaaaataacaacatctccggcaaaattccaccggagctcggttttctacccaaattacaaaccttggatctttccaacaaccgattctccggtgacatccctgtttccatcgaccagctaagcagccttcaatatctggacttgtcttacaacaatctcagtggccctgttcctaaattcccagcaaggactttcaacgttgctggtaatcctttgatttgtagaagcaacccacctgagatttgttctggatcaatcaatgcaagtccactttctgtttctttgagctcttcatcagcagataaacaagaggaagggcttcaaggacttgggaatctaagaagcttcacattcagagaactccatgtttatacagatggtttcagttccaagaacattctcggcgctggtggattcggtaatgtgtacagaggcaagcttggagatgggacaatggtggcagtgaaacggttgaaggatattaatggaacctcaggggattcacagtttcgtatggagctagagatgattagcttagctgttcataagaatctgcttcggttaattggttattgcgcaacttctggtgaaaggcttcttgtttacccttacatgcctaatggaagcgtcgcctctaagcttaaatctaaaccggcattggactggaacatgaggaagaggatagcaattggtgcagcgagaggtttgttgtatctacatgagcaatgtgatcccaagatcattcatagagatgtaaaggcagctaatattctcttagacgagtgctttgaagctgttgttggtgactttggactcgcaaagctccttaaccatgcggattctcatgtcacaactgcggtccgtggtacggttggccacattgcacctgaatatctctccactggtcagtcttctgagaaaaccgatgtgtttgggttcggtatactattgctcgagctcataaccggactgagagctcttgagtttggtaaaaccgttagccagaaaggagctatgcttgaatgggtgaggaaattacatgaagagatgaaagtagaggaactattggatcgagaactcggaactaactacgataagattgaagttggagagatgttgcaagtggctttgctatgcacacaatatctgccagctcatcgtcctaaaatgtctgaagttgttttgatgcttgaaggcgatggattagccgagagatgggctgcttcgcataaccattcacatttctaccatgccaatatctctttcaagacaatctcttctctgtctactacttctgtctcaaggcttgacgcacattgcaatgatccaacttatcaaatgtttggatcttcggctttcgatgatgacgatgatcatcagcctttagattcctttgccatggaactatccggtccaagataa

SEQ ID NO: 262 - protein, 573 aa, Arabidopsis thaliana
MKIQIHLLYSFLFLCFSTLTLSSEPRNPEVEALISIRNNLHDPHGALNNWDEFSVDPCSWAMITCSPDNLVIGLGAPSQSLSGGLSESIGNLTNLRQVSLQNNNISGKIPPELGFLPKLQTLDLSNNRFSGDIPVSIDQLSSLQYLDLSYNNLSGPVPKFPARTFNVAGNPLICRSNPPEICSGSINASPLSVSLSSSSADKQEEGLQGLGNLRSFTFRELHVYTDGFSSKNILGAGGFGNVYRGKLGDGTMVAVKRLKDINGTSGDSQFRMELEMISLAVHKNLLRLIGYCATSGERLLVYPYMPNGSVASKLKSKPALDWNMRKRIAIGAARGLLYLHEQCDPKIIHRDVKAANILLDECFEAVVGDFGLAKLLNHADSHVTTAVRGTVGHIAPEYLSTGQSSEKTDVFGFGILLLELITGLRALEFGKTVSQKGAMLEWVRKLHEEMKVEELLDRELGTNYDKIEVGEMLQVALLCTQYLPAHRPKMSEVVLMLEGDGLAERWAASHNHSHFYHANISFKTISSLSTTSVSRLDAHCNDPTYQMFGSSAFDDDDDHQPLDSFAMELSGPR

SEQ ID NO: 263 - DNA, 1806 bp, Arabidopsis thaliana
  CDS (1)..(1806)
atggagtcgagttatgtggtgtttatcttactttcactgatcttacttccgaatcattcactgtggcttgcttctgctaatttggaaggtgatgctttgcatactttgagggttactctagttgatccaaacaatgtcttgcagagctgggatcctacgctagtgaatccttgcacatggttccatgtcacttgcaacaacgagaacagtgtcataagagttgatttggggaatgcagagttatctggccatttagttccagagcttggtgtgctcaagaatttgcagtatttggagctttacagtaacaacataactggcccgattcctagtaatcttggaaatctgacaaacttagtgagtttggatctttacttaaacagcttctccggtcctattccggaatcattgggaaagctttcaaagctgagatttctagatctatcaaataacagactctctggttcagttcctgacaatggctccttctcactcttcacacccatcagttttgctaataacttagacctatgtggacctgttacaagtcacccatgtcctggatctcccccgttttctcctccaccaccttttattcaacctcccccagtttccaccccgagtgggtatggtataactggagcaatagctggtggagttgctgcaggtgctgctttgctctttgctgctcctgcaatagcctttgcttggtggcgacgaagaaagccactagatattttcttcgatgtccctgccgaagaagatccagaagttcatctgggacagctcaagaggttttctttgcgggagctacaagtggcgagtgatgggtttagtaacaagaacattttgggcagaggtgggtttgggaaagtctacaagggacgcttggcagacggaactcttgttgctgtcaagagactgaaggaagagcgaactccaggtggagagctccagtttcaaacagaagtagagatgataagtatggcagttcatcgaaacctgttgagattacgaggtttctgtatgacaccgaccgagagattgcttgtgtatccttacatggccaatggaagtgttgcttcgtgtctcagagagaggccaccgtcacaacctccgcttgattggccaacgcggaagagaatcgcgctaggctcagctcgaggtttgtcttacctacatgatcactgcgatccgaagatcattcaccgtgacgtaaaagcagcaaacatcctcttagacgaagaattcgaagcggttgttggagatttcgggttggcaaagctaatggactataaagacactcacgtgacaacagcagtccgtggcaccatcggtcacatcgctccagaatatctctcaaccggaaaatcttcagagaaaaccgacgttttcggatacggaatcatgcttctagaactaatcacaggacaaagagctttcgatctcgctcggctagctaacgacgacgacgtcatgttacttgactgggtgaaaggattgttgaaggagaagaagctagagatgttagtggatccagatcttcaaacaaactacgaggagagagaactggaacaagtgatacaagtggcgttgctatgcacgcaaggatcaccaatggaaagaccaaagatgtctgaagttgtaaggatgctggaaggagatgggcttgcggagaaatgggacgaatggcaaaaagttgagattttgagggaagagattgatttgagtcctaatcctaactctgattggattcttgattctacttacaatttgcacgccgttgagttatctggtccaaggtaa

SEQ ID NO: 264 - protein, 601 aa, Arabidopsis thaliana
MESSYVVFILLSLILLPNHSLWLASANLEGDALHTLRVTLVDPNNVLQSWDPTLVNPCTWFHVTCNNENSVIRVDLGNAELSGHLVPELGVLKNLQYLELYSNNITGPIPSNLGNLTNLVSLDLYLNSFSGPIPESLGKLSKLRFLDLSNNRLSGSVPDNGSFSLFTPISFANNLDLCGPVTSHPCPGSPPFSPPPPFIQPPPVSTPSGYGITGAIAGGVAAGAALLFAAPAIAFAWWRRRKPLDIFFDVPAEEDPEVHLGQLKRFSLRELQVASDGFSNKNILGRGGFGKVYKGRLADGTLVAVKRLKEERTPGGELQFQTEVEMISMAVHRNLLRLRGFCMTPTERLLVYPYMANGSVASCLRERPPSQPPLDWPTRKRIALGSARGLSYLHDHCDPKIIHRDVKAANILLDEEFEAVVGDFGLAKLMDYKDTHVTTAVRGTIGHIAPEYLSTGKSSEKTDVFGYGIMLLELITGQRAFDLARLANDDDVMLLDWVKGLLKEKKLEMLVDPDLQTNYEERELEQVIQVALLCTQGSPMERPKMSEVVRMLEGDGLAEKWDEWQKVEILREEIDLSPNPNSDWILDSTYNLHAVELSGPR

SEQ ID NO: 265 - DNA, 1575 bp, Arabidopsis thaliana
  CDS (1)..(1575)
atggaacatggatcatcccgtggctttatttggctgattctatttctcgattttgtttccagagtcaccggaaaaacacaagttgatgctctcattgctctaagaagcagtttatcatcaggtgaccatacaaacaatatactccaaagctggaatgccactcacgttactccatgttcatggtttcatgttacttgcaatactgaaaacagtgttactcgtctggaactttttaacaataatattactggggagatacctgaggagcttggcgacttgatggaactagtaagcttggacctttttgcaaacaacataagcggtcccatcccttcctctcttggcaaactaggaaaactccgcttcttttatgacaaaaatgttatcatcctgaaatgcagtgatatctcaaacaatcggctcagtggagatattcctgttaatggttccttttcgcagttcacttctatgaggttttccttcttattcttaggtcactttcttgatgtacctgctgaagaagacccagaggtttatttaggacaatttaaaaggttctccttgcgtgaactgctagttgctacagagaaatttagcaaaagaaatgtattgggcaaaggacgttttggtatattgtataaaggacgtttagctgatgacactctagtggctgtgaaacggctaaatgaagaacgtaccaagggtggggaactgcagtttcaaaccgaagttgagatgatcagtatggccgttcataggaacttgcttcggcttcgtggcttttgcatgactccaactgaaagattacttgtttatccctacatggctaatggaagtgttgcttcttgtttaagagagcgtcctgaaggcaatccagcccttgactggccaaaaagaaagcatattgctctgggatcagcaagggggctcgcatatttacacgatcattgcgaccaaaagatcattcacctggatgtgaaagctgcaaatatactgttagatgaagagtttgaagctgttgttggagattttgggctagcaaaattaatgaattataacgactcccatgtgacaactgctgtacggggtacgattggccatatagcgcccgagtacctctcgacaggaaaatcttctgagaagactgatgtttttgggtacggggtcatgcttctcgagctcatcactggacaaaaggctttcgatcttgctcggcttgcaaatgatgatgatatcatgttactcgactgggtgaaagaggttttgaaagagaagaagttggaaagccttgtggatgcagaactcgaaggaaagtacgtggaaacagaagtggagcagctgatacaaatggctctgctctgcactcaaagttctgcaatggaacgtccaaagatgtcagaagtagtgagaatgctggaaggagatggtttagctgagagatgggaagaatggcaaaaggaggagatgccaatacatgattttaactatcaagcctatcctcatgctggcactgactggctcatcccctattccaattcccttatcgaaaacgattacccctcggggccaagataa

SEQ ID NO: 266 - protein, 524 aa, Arabidopsis thaliana
MEHGSSRGFIWLILFLDFVSRVTGKTQVDALIALRSSLSSGDHTNNILQSWNATHVTPCSWFHVTCNTENSVTRLELFNNNITGEIPEELGDLMELVSLDLFANNISGPIPSSLGKLGKLRFFYDKNVIILKCSDISNNRLSGDIPVNGSFSQFTSMRFSFLFLGHFLDVPAEEDPEVYLGQFKRFSLRELLVATEKFSKRNVLGKGRFGILYKGRLADDTLVAVKRLNEERTKGGELQFQTEVEMISMAVHRNLLRLRGFCMTPTERLLVYPYMANGSVASCLRERPEGNPALDWPKRKHIALGSARGLAYLHDHCDQKIIHLDVKAANILLDEEFEAVVGDFGLAKLMNYNDSHVTTAVRGTIGHIAPEYLSTGKSSEKTDVFGYGVMLLELITGQKAFDLARLANDDDIMLLDWVKEVLKEKKLESLVDAELEGKYVETEVEQLIQMALLCTQSSAMERPKMSEVVRMLEGDGLAERWEEWQKEEMPIHDFNYQAYPHAGTDWLIPYSNSLIENDYPSGPR

SEQ ID NO: 267 - DNA, 1860 bp, Sorghum bicolor
  CDS (1)..(1860)
atgatgagacattcagaaataatgaagctattagcttttgtgctacttatgttgggatgccaacagtcttcactttgtctcgctgtcgactcccaagtcgaagcactggttgaaatgaagatgcaacttgtcgataaccgtggtgtccttagtgattggaaggataatcaaatgagcccctgctactgggaatatgttaattgtcaggacaacaaagtttcaacaataactttgagctcgtctgggttaacaggaaccttatcacccagcattgctaagctaacaactttacagcagctgaaactggataacaacaacataactggagggattcctccggagtttggaaacctatcaagtttgacaattctaaaccttggaagaaataatttaaatggatcgataccagactcccttggacaactttctaaactccaaattctggatctaagtcacaatcatttaagtgggaatatcccaagctctttctcaaatcctccatcattgaatgatattaatctagcatataataatattagcggtgaaatcccacaacatctacttcaggcggctcattacaactttacaggcaaccacttgaattgtggccaaaatttatttccatgtgaaggaggtagcacaatgacaggtggatcgaaaaattccaagctaaaggtggttattggaagcattgctggagcagtcactctttgtgtaactgtagctctagttttgctatggtggcaaagaatgcgttatcggcctgaaatcttcattgacgtgtcaggtcagaatgatcatatgcttgagtttgggcaaataaagcggttctcatggcgagagcttcagattgcaaccaactatttcagtgaacaaaatgttcttggcaagggtggttttggtaaggtgtataaaggagttcttccaggtccagacagtataaagattgcagtgaaacgactattcaatgtggagaggcatgaaggggaattggctttccttagagaagttgaattgataagcattgctgtgcacaagaacatattaaggttgataggattctgtacaacaccaacagagaggctcttggtctaccctttcatggagaatcttagtgttgcttctcgtttaagagatataaaattaaatgaaccagtattagattggtctacaagaatgcgaattgctcttggtgctgcccgtggtttggaataccttcatgagcactgcaatcccaagatcatccaccgtgacgtcaaggctgcaaatgtcctgcttgatgggaacttcgaagcagtggtaggggattttgggttagccaagatgatggacatagggaggaatacagtaacaacaggggttcgtgggactatgggccacatagctcctgagtacataaagacaggaaggccatcagtgaagacagatatctatggatatggtgtcatgctgttagagattgtgacaggagagcgtgcaattgcattccatcctgaccgtatggaagaagcaggggagatcatgctcattgatcaggtcaagctatggatggaagaagggcgactactcgacctagtagatcgcaatctaggtggcgtctacaaccttgaagagctggagaaggttacccagatagcacttctctgcacccacatggaacctagtcaacgccctacaatgtcagaggtcgtgcagatgctggaaggagagattgtcccagcagagcgttgggaggaatggcagctggctgagctccaacgacgacaacagcatgagatgaggcaacagggaaaactattcaacttcagtgaagagtctctaaacatccaggaagccattgagttgtcaactggcagatga

SEQ ID NO: 268 - protein, 619 aa, Sorghum bicolor
MMRHSEIMKLLAFVLLMLGCQQSSLCLAVDSQVEALVEMKMQLVDNRGVLSDWKDNQMSPCYWEYVNCQDNKVSTITLSSSGLTGTLSPSIAKLTTLQQLKLDNNNITGGIPPEFGNLSSLTILNLGRNNLNGSIPDSLGQLSKLQILDLSHNHLSGNIPSSFSNPPSLNDINLAYNNISGEIPQHLLQAAHYNFTGNHLNCGQNLFPCEGGSTMTGGSKNSKLKVVIGSIAGAVTLCVTVALVLLWWQRMRYRPEIFIDVSGQNDHMLEFGQIKRFSWRELQIATNYFSEQNVLGKGGFGKVYKGVLPGPDSIKIAVKRLFNVERHEGELAFLREVELISIAVHKNILRLIGFCTTPTERLLVYPFMENLSVASRLRDIKLNEPVLDWSTRMRIALGAARGLEYLHEHCNPKIIHRDVKAANVLLDGNFEAVVGDFGLAKMMDIGRNTVTTGVRGTMGHIAPEYIKTGRPSVKTDIYGYGVMLLEIVTGERAIAFHPDRMEEAGEIMLIDQVKLWMEEGRLLDLVDRNLGGVYNLEELEKVTQIALLCTHMEPSQRPTMSEVVQMLEGEIVPAERWEEWQLAELQRRQQHEMRQQGKLFNFSEESLNIQEAIELSTGR

SEQ ID NO: 269 - DNA, 1842 bp, Brassica napus
  CDS (1)..(1842)
atgacgaacaagaccagtttaggtctctccgtcttcttcttcctcctcactctcgccgccgtcacatcagatctagaatccgaccgacgagcactcatcgctctccgcgacggcgtccacggccgtcctctcctctggaacctcaccgcccctccgtgcacttggggaggagtccaatgcaatgcgggtcgggtcacagcactccggttacccggcgtgggtttatcagacccattaccaatcgcaatcggaaacttaaccaagctcgaaactttatcgttccggttcaacgcgttaaccggtccgctccctgctgatttccctaacctaactctcctccgttacctttacctccaaggcaacgccttctccgaagagataccttcgttcctcttcgatttacctaacgtgatccgtatcaacctcgctcagaacaacttctccggtcagatcccggttaatgttaactcggcgacccggttagctactctttacttggaagataaccagctaaccggtccgatcccggagattaagctcaagcttcagcagtttaatgtctcttcgaatcagcttaacgggtctataccggatccgttgtcgggtatgcccaaaaccgcttttgaaggtaactctctctgtgggaagccgttagccgcttgcgccgtcgccggaaaggggaaaagcgacaagctttcagccggagttatcgccggaatagtgattggttgtgtcgccgtgcttatcttgctctgcttgatcttgttctgtctctgcagaaagaagaagaaagagaacaatgtggagtcgagaaacatcgaagcagcagcagcagctcctgtgccagccgccgtagctagggaaacgacggtggagaatgttcctcctccggtggctaacggttcatctgaaaacggtgcggctaagaacagtaaagatctgacgtttttcgtgaaatcgttcggcgtgttcgatctcgacggtttgctgaaggcttctgcggaggttcttggaaaaggagcgtttggatcgtcgtataaagcgagtttcgagcatggattagtggtggctgtgaagcggttgagagatgtggttgtgcctgagaaagagtttaaagagaagttgcaggttcttggttcaatcagccatccaaatcttgtggcattgatcgcttattacttcagccgtgacgagaagcttgttgtgttcgagtacatgtcaagaggaagcttgtctgctctcttacacgggaacaaagggagtggtagaagtccattgagttgggaaacaagagctggtatagctctaggagcagcaagagccattagttaccttcattcacgtgacgctacaacatctcatggaaacattaagtcttgtaacattctcttgtctgaatcctatgaggctaaggtctctgactactgtcttgcgcctatgatcagccctacatctacaccgaaccgcattgatggttaccgtgctcctgaagtaaccgatgcgcgtagaatctcccaaaaggctgatgtttacagcttcggtgttctcattcttgaattactcacagggaaatctccaacgcatcagcagctaaacgaagaaggagtagatttaccgagatgggtttcatctatcactgagcaacaatcaccttcagatgtgtttgatccagagctaactaggtatcaagctgagggtaatgagaacatgatcaggcttttgaagattggtataagttgtactgctcagtatccagatagtcgtccgtcgatggctgaagtcaccaggctcattgaggaggtttctcgttcatctggttcacatagtcctttgtctggttga

SEQ ID NO: 270 - protein, 613 aa, Brassica napus
MTNKTSLGLSVFFFLLTLAAVTSDLESDRRALIALRDGVHGRPLLWNLTAPPCTWGGVQCNAGRVTALRLPGVGLSDPLPIAIGNLTKLETLSFRFNALTGPLPADFPNLTLLRYLYLQGNAFSEEIPSFLFDLPNVIRINLAQNNFSGQIPVNVNSATRLATLYLEDNQLTGPIPEIKLKLQQFNVSSNQLNGSIPDPLSGMPKTAFEGNSLCGKPLAACAVAGKGKSDKLSAGVIAGIVIGCVAVLILLCLILFCLCRKKKKENNVESRNIEAAAAAPVPAAVARETTVENVPPPVANGSSENGAAKNSKDLTFFVKSFGVFDLDGLLKASAEVLGKGAFGSSYKASFEHGLVVAVKRLRDVVVPEKEFKEKLQVLGSISHPNLVALIAYYFSRDEKLVVFEYMSRGSLSALLHGNKGSGRSPLSWETRAGIALGAARAISYLHSRDATTSHGNIKSCNILLSESYEAKVSDYCLAPMISPTSTPNRIDGYRAPEVTDARRISQKADVYSFGVLILELLTGKSPTHQQLNEEGVDLPRWVSSITEQQSPSDVFDPELTRYQAEGNENMIRLLKIGISCTAQYPDSRPSMAEVTRLIEEVSRSSGSHSPLSG

SEQ ID NO: 271 - DNA, 1785 bp, Zea mays
  CDS (1)..(1785)
atgggctctttcctgaggaaacagcccagctacctcttcattttgataattctgcaccttgttgctcatgaggcaagaacactgagttcagatggcgaagcacttcttgctttcaaaaaggcagttacaaattcagatggagtcttcctaaattggcgtgagcaagatgcagacccctgcaattggaagggtgttagatgtgatagtcatagcaagagagtgattaatctgattcttgcataccacagattagttgggcccataccaccagaaattggaaggttaaatcagttgcaaaccttgtcattgcaggggaacagtttgtatggttcactccctcctgaactggggaattgtaccaagttgcaacaactgtatctacaaggaaattacttaagtggatacatcccttcagaattcggcgaactggtggaactcgtggcattggacttatccagtaatacattgagtggatctgttccgcattctcttgataagttgtccaaacttacatcattcaatgtttccatgaacttcctgacaggagcaataccatcttctggttcacttgtcaatttcaatgagacatcctttgttgggaaccttggtttatgtgggaagcagataaactcggtgtgcaaagatgcacttcagtcaccatcaaatggtctgcagtcaccttccccagacgacatgattaacaaaaggaacgggaagaattctaccagacttgttataagtgcagtggcaacagtgggagctctcctattggtggctttaatgtgtttctggggttgctttctttacaaaaattttggaaagaaagatatgcgtggtttcagagttgagctctgtggaggctcttctgttgtgatgttccatggagacctcccttactcctcaaaagacatactcaagaagctagagactatggatgaagaaaatatcattggagcaggaggcttcggaactgtttataaacttgcaatggatgatggcaatgtctttgctttgaaaagaatagtgaaaacaaatgaagggctagatcggttctttgatagagaacttgagatattgggaagtgttaaacatcgttacttggtcaatcttcgtggttattgcaactctccttcatcaaaacttttgatatatgattatcttcaaggtggaagcctggatgaagtgctgcatgaaaagtctgaacagttggattgggatgcacgtattaacatcatacttggagctgcaaaaggcttgtcttacttgcatcacgattgttcgcctcgaataatacatcgtgatatcaagtcgagcaacatcttgcttgacggcagttttgaggcccgtgtatcagactttggacttgcgaagcttttagaggacgaagaatcacatatcaccacaatagttgcaggaacatttggttatcttgcgccagagtatatgcagtttggcagagccaccgagaagaccgatgtctacagttttggggttctggtacttgaaatactcagcggaaagcggcctaccgatgcatccttcattgagaagggattaaacattgttggatggttaaattttctggctggagagaaccgggagagggaaatcgtcgatctgaattgtgaaggagtgcacaccgagaccttggacgccctgctctctctcgccaagcagtgtgtcagctctttgccggaggagcggccgacgatgcacagggtggtacagatgctggagtcggatgtaattacgccgtgccctagcgacttttacgattcagagtag

SEQ ID NO: 272 - protein, 594 aa, Zea mays
MGSFLRKQPSYLFILIILHLVAHEARTLSSDGEALLAFKKAVTNSDGVFLNWREQDADPCNWKGVRCDSHSKRVINLILAYHRLVGPIPPEIGRLNQLQTLSLQGNSLYGSLPPELGNCTKLQQLYLQGNYLSGYIPSEFGELVELVALDLSSNTLSGSVPHSLDKLSKLTSFNVSMNFLTGAIPSSGSLVNFNETSFVGNLGLCGKQINSVCKDALQSPSNGLQSPSPDDMINKRNGKNSTRLVISAVATVGALLLVALMCFWGCFLYKNFGKKDMRGFRVELCGGSSVVMFHGDLPYSSKDILKKLETMDEENIIGAGGFGTVYKLAMDDGNVFALKRIVKTNEGLDRFFDRELEILGSVKHRYLVNLRGYCNSPSSKLLIYDYLQGGSLDEVLHEKSEQLDWDARINIILGAAKGLSYLHHDCSPRIIHRDIKSSNILLDGSFEARVSDFGLAKLLEDEESHITTIVAGTFGYLAPEYMQFGRATEKTDVYSFGVLVLEILSGKRPTDASFIEKGLNIVGWLNFLAGENREREIVDLNCEGVHTETLDALLSLAKQCVSSLPEERPTMHRVVQMLESDVITPCPSDFYDSE

SEQ ID NO: 273 - DNA, 1815 bp, Zea mays
  CDS (1)..(1815)
atggctgttagatgctcctgtactgctcttttccctctactcttctgttttatgatctgtcagctttgctatggcactgtaactgatatccaatgtctgaagaagctgaaggcatcagttgatcccgacaataagttagaatggacattcaataacaatacagagggatccatatgcgggttcaatggtgtggagtgctggcatcctaatgagaacagggttctttcgcttcatcttggtagctttggtcttaagggcgaattccctgatggacttgagaattgtagtagcatgactttgctggatctctcaagcaacagcctctctggccctatccccgctgacatctcgaggagacttccatttgttacaaaccttgatctatcatttaatagcttctccggagagataccagaagcactagccaattgttcttatctcaacattgtcaatttacaacataacaaattgactggaacaatcccagttcaacttgctgcactcagtcgcctagcccagtttaatgttgctgacaatcaattgtcagggcagattccttcatctttgagcaagtttgcagcctctgattttgcaaatcaagacctttgtgggaggcctctaagcaatgattgcactgccaattcaagcagtcgaacggggataattgttggttctgctgttggtggtgcagttataactttaataatagctgctgttattttattcattgtcttgcgaaaaatgcctaagaagaagaagttaaaggatgtagaagaaaataagtgggcaaagactattaagggagcaaaaggagcaaaggtatcattgtttgagaaatcagtttcaaagatgaacttgaatgatcttatgaaagcaacagatgattttacaaaggacaatattattggaactggtcgatcaggaactatgtacagagcaacacttccagatggttcattccttgctatcaagaggttgcaggacactcagcattcagaggaccaatttacatctgagatgtcaactctgggaagtgtaaggcaacgtaacttagtgccacttttgggatactgcattgtcaagaatgagaggctcttggtgtataagtacatgccaaagggttcactttatgataatttacaccagcaaaacagtgacaaaaaggcattagaatggccattgagactaaaaattgccattgggagtgctagaggtttggcgtggcttcatcacagttgcaaccctcgcattcttcataggaacattagttccaagtgcatattgcttgatgatgactatgagcctaagatttccgattttggcttggcaaggcttatgaatcccatcgacacccacctgagcacatttgtgaatggtgagtttggtgacttagggtatgtagctccggagtatacacgcactcttgtggccactccaaaaggggatgtgtatagctttggagttgtcttacttgaacttgttactcgtgaagagtccacacatgtgtcaaatgcgccagagaacttcaaagggagtttggtggattggataacgtacctgtcaaacaactctatacttcaggatgcagttgacaagtctttgattggaaaggacaacgatgctgagctgcttcagtgcatgaaggttgcatgctcttgtgtgctttcttctccaaaggaaaggcctacaatgtttgaagtttaccagctcctgagagctgttggagagaaatatcatttcagtgcagctgacgatgaattgacgatgctacctcaaaatgccaatcctgaagatgagcttattgtagcgaactag

SEQ ID NO: 274 - protein, 604 aa, Zea mays
MAVRCSCTALFPLLFCFMICQLCYGTVTDIQCLKKLKASVDPDNKLEWTFNNNTEGSICGFNGVECWHPNENRVLSLHLGSFGLKGEFPDGLENCSSMTLLDLSSNSLSGPIPADISRRLPFVTNLDLSFNSFSGEIPEALANCSYLNIVNLQHNKLTGTIPVQLAALSRLAQFNVADNQLSGQIPSSLSKFAASDFANQDLCGRPLSNDCTANSSSRTGIIVGSAVGGAVITLIIAAVILFIVLRKMPKKKKLKDVEENKWAKTIKGAKGAKVSLFEKSVSKMNLNDLMKATDDFTKDNIIGTGRSGTMYRATLPDGSFLAIKRLQDTQHSEDQFTSEMSTLGSVRQRNLVPLLGYCIVKNERLLVYKYMPKGSLYDNLHQQNSDKKALEWPLRLKIAIGSARGLAWLHHSCNPRILHRNISSKCILLDDDYEPKISDFGLARLMNPIDTHLSTFVNGEFGDLGYVAPEYTRTLVATPKGDVYSFGVVLLELVTREESTHVSNAPENFKGSLVDWITYLSNNSILQDAVDKSLIGKDNDAELLQCMKVACSCVLSSPKERPTMFEVYQLLRAVGEKYHFSAADDELTMLPQNANPEDELIVAN

SEQ ID NO: 275 - DNA, 2320 bp, Brassica napus
  CDS (293)..(2143)
ctcaatctgaatcctccccggagaaaaaaagtagtcaacggtcagcgatctcggaggagtttcaaatcgagaaatacagcagagatcgagcttagggggtttctcttcaaattaaaagtcaacgggtgaatacgcgtcgagggagggctctttgtctttgactttttggggcttccttgtggtaagctcaaatcgaggactccagatccttaatttgtggtgggggtgtaaaaagcttggatctttctatgatgagcatcttcaaatgaaagtttaatttaagaagttgtgaatggaacgaagattgatgaagatagctcgattcttttggctggttctggttttcgatttggttctcagaacttctggcaacgccgaaggtgatgctctgagtgctctgaagaacagtttatccgaccctaacaaggtgcttcagagttgggatgctactcttgttaccccttgtacttggtttcatgttacttgcaatagtgagaacagtgttacccgtgttgatcttgggaatgcggatctatctggtcagcttgtaatgcagcttggtcagctcccaaacttgcagtacttggagctttacagcaacaacatcactgggaaaataccaaaacagcttggaaacttgacggaactggtgagcttagatctttaccagaacaaactaagcggtcccatcccaaactcgcttggcaaactacacaaactccgcttcttgcgtctaaataacaacaacttatctggagaaatcccaaggtctttgactgctgtcttgtcgctgcaagttctggatctctcaaacaatcatctcactggagatattcctgttaatggttccttttcacttttcacacccatcagttttgccaacaccaatttgactccccttcccgcttctccgcctcctcccatctctcctacaccgccatcacctgcagggagtaatagaattactggagcaattgcgggaggagttgccgcaggtgctgcgcttctatttgctgttccagccattgcacttgctttgtggcgaaggaaaaagccacaggaccacttcttcgatgtaccagctgaagaggacccagaggttcatttaggacaactcaagaggttttcattacgtgaactacaagttgcttcggataactttagcaacaggaacatattgggtaaaggagggtttggtaaagtttataaaggaaggttagccgatggcaccctagtggcgattaaaagactgaaagaggaacgcacacaaggtggagagctgcagttccagaccgaggttgagatgattagtatggctgttcataggaacttgcttcgtcttcgtggcttttgcatgactccaacagaaagattgcttgtttatccttacatggctaatggaagtgttgcatcctgtttaagagaccgtccagagtcacagccaccacttgattggccaaagagacagggcattgcgttgggatcggcaagggggcttgcatatttacatgatcattgcgacccaaagatcattcatagagatgtgaaagctgcaaatatattgttggacgaagactttgaagccgtggtcggagattttggactagcaaaactcatggactacaaagacacacatgtaacaaccgcagtgcgtggtacaattggtcatatagcacctgagtatctttctacgggaaaatcatcagagaaaacggatgtgtttggttatggagtcatgcttcttgagctgattactggacaaagagctttcgaccttgctcgcctcgccaatgacgatgatgtcatgttactagactgggtgaaagggttgttgaaagagaagaagttggaagcgctagtagatgtggatcttcatggtaattatatagacgaggaagtggagcagctgatacaagtggctctgctctgcactcagagctcaccgatggagagacccaaaatgtctgaagttgtgagaatgcttgaaggagatggtttagctgagagatgggaagagtggcaaaaggaggaaatgttcagacaagatttcagttaccaaaactataaccaacccaacactgcctggctcataggcgattccacttcccacatcgaaaacgattacccctcgggtccaagataagattcgtaacacgaattatttctgtttttatttttcttcttatgtatttattaagggtttagtttatgctgatccatattattgagttctttaagcgagtacatgtatgaagattcaggtggggtttgtaagttgtaatgtttacgtgaaaagggacttgaatatttgaaagctaaa

SEQ ID NO: 276 - protein, 616 aa, Brassica napus
MERRLMKIARFFWLVLVFDLVLRTSGNAEGDALSALKNSLSDPNKVLQSWDATLVTPCTWFHVTCNSENSVTRVDLGNADLSGQLVMQLGQLPNLQYLELYSNNITGKIPKQLGNLTELVSLDLYQNKLSGPIPNSLGKLHKLRFLRLNNNNLSGEIPRSLTAVLSLQVLDLSNNHLTGDIPVNGSFSLFTPISFANTNLTPLPASPPPPISPTPPSPAGSNRITGAIAGGVAAGAALLFAVPAIALALWRRKKPQDHFFDVPAEEDPEVHLGQLKRFSLRELQVASDNFSNRNILGKGGFGKVYKGRLADGTLVAIKRLKEERTQGGELQFQTEVEMISMAVHRNLLRLRGFCMTPTERLLVYPYMANGSVASCLRDRPESQPPLDWPKRQGIALGSARGLAYLHDHCDPKIIHRDVKAANILLDEDFEAVVGDFGLAKLMDYKDTHVTTAVRGTIGHIAPEYLSTGKSSEKTDVFGYGVMLLELITGQRAFDLARLANDDDVMLLDWVKGLLKEKKLEALVDVDLHGNYIDEEVEQLIQVALLCTQSSPMERPKMSEVVRMLEGDGLAERWEEWQKEEMFRQDFSYQNYNQPNTAWLIGDSTSHIENDYPSGPR

SEQ ID NO: 277 - DNA, 1830 bp, Glycine max
  CDS (1)..(1830)
atggatttggcatctgttcttttgctattgactagcttatgctcttcttctgcactgcatgagcttgattcacaagaagatgcattgtatgctttgaaggtatcattgaatgtttctgccaaccagcttacaaactggaataaaaatctagtaaacccttgtacttggtccaatgttgaatgtgaccagaatagcaacgttgttcgaatttcactagaatttatgggattcacaggatcattgacaccaagaataggatctctaaaaagtcttacaattctttctttgcaagggaataacatcactggtgacataccaaaagaatttggaaatcttacaaacttggtcagattggatttggaaaacaacaaattaactggtgaaataccatattcacttggtaatcttaaaaagcttcaattcttgacattgagtcaaaacaatctcaatgggactattccagaatcacttgccagtctcccaagcttgatcaatgttatgctagattcaaatgatcttagcgggcagattccagagcagttattcagcattcctatgtacaagtatgtatgtttcactggaaataatttgaattgtggtgtgaattaccatcatctttgcacatctgataatgcatatcaagattcgtcacataaaacaaaaataggcctcatagctggaacagttacaggtttagttgttattctttttcttggtggcctgctgttcttctggtacaaggggtgcaagagtgaagtttatgtagatgttccaggtgaagtcgatcgccgaattacatttggtcaaataaaaagattttcctggaaagaactgcagatagctacagacaacttcagcgagaaaaatattttaggacagggaggttttggaaaggtttataaaggtattctagcagatggcaccaaagttgctgtcaaaaggttaactgattatgaaagtcctgcgggtgatgcagctttccagcgtgaagtggagttgataagcatagctgtccataggaatctgttacggctcattggtttttgtactacttcaactgaacgcctcttagtttatcccttcatgcagaacttaagtgttgcctatcgtttacgagaactcaaacgtggggaacccgttttagattggcctaccagaaaacgagtggctctaggaactgcccgtggcctagaatatcttcacgagcaatgcaatcctaggattattcatagggatgtgaaggcagctaatatattacttgatggagattttgaagcagttgtcggcgactttggttcggcaaaattagttgatattcgacatactaatgtgacaactcaagttcgtgggacaatgggtcatatagctccagaatacttgtccactgcaaaatcttcagaaaggacagatgtttttggctatgggattatgcttatggagcttgtaacaggtcaacgtgcaattgacttttcacgtctggaagaggaagatgacgtcttattgcttgaccatgttaagaaactgcagcgggagaaaagactagagactattgtcgattgcaaccttaataaaaattacaacatagaagatgttgaagtaattgtacaaattgcattactctgcacacaagcatcacccgaggatcgtccagcaatgtcagaggttgtaagaatgttagagggagaagggctagctgaaagatgggaggaatggcagcatgtggaggtcaatacaaggcaagattatgagagactgcaaagaagaatgaactggggagaagattcggtttataataaccaagatgcagttgagttatcgggtggaagatga

SEQ ID NO: 278 - protein, 609 aa, Glycine max
MDLASVLLLLTSLCSSSALHELDSQEDALYALKVSLNVSANQLTNWNKNLVNPCTWSNVECDQNSNVVRISLEFMGFTGSLTPRIGSLKSLTILSLQGNNITGDIPKEFGNLTNLVRLDLENNKLTGEIPYSLGNLKKLQFLTLSQNNLNGTIPESLASLPSLINVMLDSNDLSGQIPEQLFSIPMYKYVCFTGNNLNCGVNYHHLCTSDNAYQDSSHKTKIGLIAGTVTGLVVILFLGGLLFFWYKGCKSEVYVDVPGEVDRRITFGQIKRFSWKELQIATDNFSEKNILGQGGFGKVYKGILADGTKVAVKRLTDYESPAGDAAFQREVELISIAVHRNLLRLIGFCTTSTERLLVYPFMQNLSVAYRLRELKRGEPVLDWPTRKRVALGTARGLEYLHEQCNPRIIHRDVKAANILLDGDFEAVVGDFGSAKLVDIRHTNVTTQVRGTMGHIAPEYLSTAKSSERTDVFGYGIMLMELVTGQRAIDFSRLEEEDDVLLLDHVKKLQREKRLETIVDCNLNKNYNIEDVEVIVQIALLCTQASPEDRPAMSEVVRMLEGEGLAERWEEWQHVEVNTRQDYERLQRRMNWGEDSVYNNQDAVELSGGR

SEQ ID NO: 279 - DNA, 1791 bp, Glycine max
  CDS (1)..(1791)
atgtttcgccaaaatttgagcaggggacctctcaaaatattgacgaggtggctcatattccttactatcttacaagtcagttgtgctatcaaagatcctgatgtagaaggtgaagctctgcttgatcttttgcatttcctcaatgattccaataagcaaataacggactgggacagttttttagtgagcccgtgcttcagttggtctcatgtcacttgtagaaacgggcatgtcatatccctggccttggcttcagttggattttctggaacgctttctccctcaattatcaaattgaagtatttgtctagcttagaattgcagaacaacaacctttctggacccttgcctgattacatttccaacttgacagagctacaatatctaaatcttgctgacaacaattttaatggttctataccagctaaatggggtgaactacccaatctaaagcatctggatctttcatctaatggtcttacgggaagcatcccaaagcaactcttttcagttccattgtttaactttacagatacgcaactccagtgtggccctggcttcgagcagccttgcgcttctaaatctgaaaatccagcttcagcccacaaatcaaaattggcaaaaattgtacgttatgcaagttgtggtgcatttgcacttctgtgtcttggggctatctttacgtatcgacaacatcaaaagcacaggcgaaaaagtgatgatgtctttgttgatgtttcaggtgaagacgacagaaaaatttttttcgggcaattgagaagattttcttggcgtgaactccaacttgccactaaaaatttcagtgaaggcaatgtaattggtcagggtggctttggaaaagtgtacaaaggagtactctctgataacacaaaagtcgctgtgaaacgcctcattgattatcacaatcctggtggagaggctgcgttcgagagagaagttcaactaataagtgttgcagttcatagaaacctcctaagactaattggattctgcacaaccacaactgaaagaatccttgtgtaccctttcatggaaaatctaagtgtagcatatcgactgagagatttaaaacctggtgagaaaggcttggactggccaacaaggaaacgcgtggcttttggcactgcccatggtttggagtatttacatgagcaatgcaatcccaagataatacatcgtgatctaaaggctgcaaatatcctactagatgatgaatttgaagctgttctaggtgattttgggctagccaagctggttgatgcaaggatgactcatgtcaccactcaagttaggggcacaatgggtcacattgccccagagtatttgtccactggaaaatcttcagaaaagactgatgtttttggatatggcataacacttcttgaacttgtcaccggtgagcgtgcattagacctctctcggcttgaagaggacgaggatgttcttctgattgattatgtgaaaaagctgctgagagagaaaaggttggaggacattgttgatagaaatttggagagttatgatccaaaggaagttgagacgattctacaggttgcattgctttgcacccaaggctatcccgaggatcgtccaaccatgtcagaggtggtgaaaatgctgcagggagttggcttggcagatagatgggctgactggcagcaacttgaagaggctaggaatcaagaattctcactcatgactcaccaatttgtttggaatgatgagtctactcttgatcaagaagccatacagctttccagagcaagataa

SEQ ID NO: 280 - protein, 596 aa, Glycine max
MFRQNLSRGPLKILTRWLIFLTILQVSCAIKDPDVEGEALLDLLHFLNDSNKQITDWDSFLVSPCFSWSHVTCRNGHVISLALASVGFSGTLSPSIIKLKYLSSLELQNNNLSGPLPDYISNLTELQYLNLADNNFNGSIPAKWGELPNLKHLDLSSNGLTGSIPKQLFSVPLFNFTDTQLQCGPGFEQPCASKSENPASAHKSKLAKIVRYASCGAFALLCLGAIFTYRQHQKHRRKSDDVFVDVSGEDDRKIFFGQLRRFSWRELQLATKNFSEGNVIGQGGFGKVYKGVLSDNTKVAVKRLIDYHNPGGEAAFEREVQLISVAVHRNLLRLIGFCTTTTERILVYPFMENLSVAYRLRDLKPGEKGLDWPTRKRVAFGTAHGLEYLHEQCNPKIIHRDLKAANILLDDEFEAVLGDFGLAKLVDARMTHVTTQVRGTMGHIAPEYLSTGKSSEKTDVFGYGITLLELVTGERALDLSRLEEDEDVLLIDYVKKLLREKRLEDIVDRNLESYDPKEVETILQVALLCTQGYPEDRPTMSEVVKMLQGVGLADRWADWQQLEEARNQEFSLMTHQFVWNDESTLDQEAIQLSRAR

SEQ ID NO: 281 - DNA, 1875 bp, Glycine max
  CDS (1)..(1875)
atggaacatagtagtagtttggttttctggctactggggttgctgcttctgctgttgatggaaatttcttctgctgcgctttctccttctggcataaactatgaagttgtagctctgatggccataaagaatgacttgattgatcctcacaatgttctggaaaattgggatattaattctgttgatccatgtagctggagaatgattacctgttcccctgatggctctgtttcagcattgggattgcccagtcagaacttgtctggtacactatctcctgggatgggaaaacctactaacttacaatctgtcttgcttcagaataaagctatttctggtagaattcctgctgcaataggaagcttggaaaagcttcagacactcgatatttccaataatgcatttagtggtgagatacccagttctttgggaggcctcaagaacctgaattatttgaggttaaataataacagccttacaggatcctgccctcagtctcttagcaacattgaaggtctaacccttgtggacctctcctacaacaatctgagtggttccctgccaagaatatcagcaagaactttaaagattgtgggtaactctttaatttgtggcccaaaagcaaacaactgttctactattttaccagagccactttccttccctccagatgcactgagaggccaatcagactctggtaaaaaaagccatcatgtggcacttgcttttggtgcaagttttggtgctgcttttgtccttgtgattatagttgggtttcttgtttggtggcgatatagacgcaaccagcagatattctttgatgtcaatgaacattatgatccagaggtgcgtcttggtcatttaaaaaggttttcattcaaagagcttcgagctgcaactgaccatttcaactcaaagaacattctaggaagaggtggctttggaatagtttacaaggcatgcttgaatgatgggtctgttgtggctgtcaaaaggttaaaggactataatgcagccggtggtgagatccaatttcagacagaagttgagaccataagtttggctgtccaccggaatcttctgcggctttcggggttttgcagtactcagcatgaaaggctccttgtttatccctacatgtctaatggcagtgtagcctctagattaaaagatcacattcacggtcggccagctttagattggacgaggcgaaagagaatagctttaggtacagcaagagggttggtttacttgcatgagcaatgtgaccctaaaattattcaccgcgatgtcaaagcagcaaacattttgctagatgaagactttgaagctgttgttggtgattttggtttagctaagcttctggatcatagagattcgcatgtgaccactgctgtgcgtggcactgtcggtcacattgctccagagtatctatccactggccaatcatcagaaaaaactgatgtgtttgggtttggaatcttgctgcttgaactgatcacaggtcataaggctctagattttgggcgagcggcaaaccagaaaggtgtaatgcttgattgggttaagaagctccaccaggatggaagattgagtcaaatggtagacaaagatctaaagggcaacttcgatctgattgaactagaagaaatggttcaggttgcactcttgtgtacacaattcaatccttcgcaccgccccaagatgtcagaagtattgaagatgttagaaggggatggcttagctgagagatgggaggcctcacagaggattgaaacaccaaggtttcggtcttgtgagcctcaaagatattcagatttaatagaggaatcttcactcgtagttgaagccatggagctttctggtcctaggtga

SEQ ID NO: 282 - protein, 624 aa, Glycine max
MEHSSSLVFWLLGLLLLLLMEISSAALSPSGINYEVVALMAIKNDLIDPHNVLENWDINSVDPCSWRMITCSPDGSVSALGLPSQNLSGTLSPGMGKPTNLQSVLLQNKAISGRIPAAIGSLEKLQTLDISNNAFSGEIPSSLGGLKNLNYLRLNNNSLTGSCPQSLSNIEGLTLVDLSYNNLSGSLPRISARTLKIVGNSLICGPKANNCSTILPEPLSFPPDALRGQSDSGKKSHHVALAFGASFGAAFVLVIIVGFLVWWRYRRNQQIFFDVNEHYDPEVRLGHLKRFSFKELRAATDHFNSKNILGRGGFGIVYKACLNDGSVVAVKRLKDYNAAGGEIQFQTEVETISLAVHRNLLRLSGFCSTQHERLLVYPYMSNGSVASRLKDHIHGRPALDWTRRKRIALGTARGLVYLHEQCDPKIIHRDVKAANILLDEDFEAVVGDFGLAKLLDHRDSHVTTAVRGTVGHIAPEYLSTGQSSEKTDVFGFGILLLELITGHKALDFGRAANQKGVMLDWVKKLHQDGRLSQMVDKDLKGNFDLIELEEMVQVALLCTQFNPSHRPKMSEVLKMLEGDGLAERWEASQRIETPRFRSCEPQRYSDLIEESSLVVEAMELSGPR

SEQ ID NO: 283 - DNA, 3182 bp, Glycine max
  CDS (329)..(2179)
ccgggtcgacaatcgtcaatacggcacccacataaacgccgtcgttcgcgcttgcgttcgcttcgttgacttaagctctctcttctcctcgacccttcttctctctcaaaaccctttctctgcattttcagctaaacctgagcacacccaactgagattttagcttcagattccgaggtaagagcagaaagaagagaacttggagctacccagagttcgattttgggttgttcaacaaggtcaagatgtttctgagcttgatggatattatgtagatcaagaggggtgtgtggattggggaagcaattgtttatgaggttgaagaagcatggagagagtgacttcatcttttatgggttccttttttttttgggcaattttggtgcttgatttggtacttaaggcttctggcaatcaggaaggtgatgccctgaatgcattgaagagcaacttgcaagatcctaacaacgttcttcaaagctgggatgctacccttgtcaatccctgcacgtggtttcatgttacatgcaacagtgataacagtgtgacccgtgttgatcttggaaatgcagatctttctggtcaactggtttcacaacttgaaaaacttacaaattggaactacttggaactttatagtaataagataactggaaaaattccagatgagcttgggaacttaaaaaacttggtgagcttggatctttacttgaacactttaaatggtcccataccgactactttgggcaaacttgcaaaaatacgtttcctgcgtctcaataataatagcttgacaggaggcatacccatatctttgacaaatgtttcttcactgcaagttcttgatctctcaaataaccatctaaaaggggaaatcccagtgaatggttcattttcattatttacccccatcagttatcaaaacaatcttggcttgatacaaccaaaatacactccatctccagtttctccaacaccaccaccagcttcttcaggtaacagtaatactggagctattgctggaggagttgctgctggtgctgctctgttgtttgcagcccctgcaattgcacttgcttattggcgaagaaggaaacctcaggatcatttctttgatgttcctgctgaggaggatcctgaagttcaccttggtcagcttaaaaggttttctctgcgtgagttgcaagttgcaacagataactttagtaacaaacacattctgggtagaggtggatttggaaaggtttataaaggacgcttagctgacggatctcttgtagcagtaaaaagacttaaagaggaacgcacgcagggtggagagctgcaatttcaaactgaagtggaaatgatcagcatggctgtgcatcgtaatttgcttcggcttcgtggtttttgtatgacacctactgagcggttgcttgtgtatccttacatggctaacggaagtgtagcatcatgtttacgagaacgtcaagaatcccaaccgccacttggctggccagaacggaagcgtattgcactgggatctgcaagggggcttgcttatttgcatgatcattgtgaccctaagattattcaccgtgatgtcaaagcagcaaatatattgttggacgaggaatttgaagcagttgttggagattttggtttagctaaacttatggattataaagatactcatgtcactactgctgtacgtggaacaattggacatatagcaccagagtacctctcaactggaaagtcttcagagaagactgatgtttttggatatggtgtgatgcttcttgaactaataactggacaaagggcttttgatctagctcgacttgccaatgatgatgatgtcatgttgcttgattgggttaaaggacttctcaaagacaggaaattggaaacactagtagatgcagatttacatggtaactacaatgatgaggaggtagagcagttaatccaagtggccttactatgcacacaaggatctcctgtggaaagacctaagatgtctgaggtggtaagaatgctagaaggtgatggtttggctgagaaatgggagcaatggcagaaagacgagacgttccggcaagactttaacagcaacatacatcaccctaatgcaaattggatagtagattcaacttcccatatccaggcagatgaactatcaggtcctagatgataacattctaaggacaggtgaatacacaatactgccggctttctgttggaaagagatatacttctgatttgtgcatataattttcgccccctctaccttttctcttgttttcatccttgtgcgcagattccatgcccattggtcagttgtgattattaaagaaagaaaattgtaatttctattgggttgtcaagttgcaggatcaagtgtatgttacaacttactagcaacttttgtcattgtaggtatgaaaaattagaatagagctttatggaaataaatacaattctattgtcgattgtattatattgacttttgtagttatttctggaggtttggaaatcaatactatttgagtcatgcctttttaaatactgagacgtttagcaaaaagagaaacgctttgttgaaactaatcgcttctctcacagctgaaaaatgttggtttggtgcaccttataagttagtgagccattattcagtggtgaataagtcttgtgtcttaacatttccaagtctttgatcactgttgcttcagtgcatgttcaacaagtgtttgtcctacattttgaataggtttttcatgaactgtagattctgggttatagtagtctcatatttttttacgtgtaacctggcacaggtaaatggtaattaagggttgtggaatatagacatagtgatttatttatgaaactaacagttaaaaggaaacaaaaaaaaaaaaaaaaaaaaaaaaaaaaaaaaaaaaaaaaaaaaaaaaaaaaaaaaaaaaaaaaaaaaaaaaaaaaaaaaaaaaaaaaaaaaaggggggggcctttttaaagaatccaattttacttacccgggcttgcaaggtaaaagtttttttatagggcccccaaaattaattcccttgcccgcgttttaaaaacgctggaaatgggaaaaaccttggggtaaccaaattaaatccctttgaaaaaaatccccttttcccaagttggggaaaaaccaaaaaggc

SEQ ID NO: 284 - protein, 616 aa, Glycine max
MERVTSSFMGSFFFWAILVLDLVLKASGNQEGDALNALKSNLQDPNNVLQSWDATLVNPCTWFHVTCNSDNSVTRVDLGNADLSGQLVSQLEKLTNWNYLELYSNKITGKIPDELGNLKNLVSLDLYLNTLNGPIPTTLGKLAKIRFLRLNNNSLTGGIPISLTNVSSLQVLDLSNNHLKGEIPVNGSFSLFTPISYQNNLGLIQPKYTPSPVSPTPPPASSGNSNTGAIAGGVAAGAALLFAAPAIALAYWRRRKPQDHFFDVPAEEDPEVHLGQLKRFSLRELQVATDNFSNKHILGRGGFGKVYKGRLADGSLVAVKRLKEERTQGGELQFQTEVEMISMAVHRNLLRLRGFCMTPTERLLVYPYMANGSVASCLRERQESQPPLGWPERKRIALGSARGLAYLHDHCDPKIIHRDVKAANILLDEEFEAVVGDFGLAKLMDYKDTHVTTAVRGTIGHIAPEYLSTGKSSEKTDVFGYGVMLLELITGQRAFDLARLANDDDVMLLDWVKGLLKDRKLETLVDADLHGNYNDEEVEQLIQVALLCTQGSPVERPKMSEVVRMLEGDGLAEKWEQWQKDETFRQDFNSNIHHPNANWIVDSTSHIQADELSGPR

SEQ ID NO: 285 - DNA, 2529 bp, Glycine max
  CDS (335)..(2200)
tcgacccacgcgtgcgggttttctttcaagtctttttttttaccattggctctgactcaacaagtctgacacaagggtgggagtgagtgcaatttctgggttcaaagcaggtgggaaatggtactgttcttggacttggttgatgaggttcctcttttgatgtaaaaaatgacatgaaatgtaacaaaaacaaaccaagttggatttggtggtgctagctgaatcattcaaattaaacctgctccttacttgcctcctcctaaagatacaacttgattcacttttgttgtaggaataactaattaataagcttctggtgatccttcaaaacccaatggagagaagaagggacgtggctctcttttgtttagctttgttcttcttgtggacttcagtggctgctttgctttctcctaaaggtgtcaactatgaagttcaagctcttatgagcattaagaactctctggcggatcctcattctgtcttaaataactgggatactgatgctgtggatccttgcaactgggccatggtcacttgctcttctgatcattttgtgattgcccttgggattccaagccaaaatatatctggcactctctcaccaagcataggaaacttaacaaacctccaaactgtgcttctgcaggataataatataacaggaccaatcccttctgagattggaaggctccaaaagcttcaaactctcgatctttctgacaatttcttcactggtcaacttccagattctctttcccacatgaagggtctccactatttgcggctaaacaataacagtctcactggaccaattccttcctctttggctaacatgactcagcttgcctttctggatatctcttataataacttgagtgaacctgtaccaagaataaatgcaaaaacattcaatatcgtaggcaatcctcagatatgtgtcacgggagttgagaagaactgctccagaacaacatcaattccttctgctccgaataattctcaagattcacaatccaccaaaagaccgaagagtcacaaagttgccttggcgtttgcttcaagcttaagctgcatatgcttactaattctgggacttggcttcctcatctggtggagacaaagatataacaagcaaatattctttgttgttaatgaacaacaccgtgaagaggtttgccttggaaacctcaagaagtttcacttcagagaacttcagcttgctacaaataacttcagcagcaagaacttgattggcaaaggtggatttggaaatgtctacaaagggtatctccaagatggtacagttatagcagtaaaaaggcttaaagatggtaatgccattggaggtgagatccaattccagactgaagttgagatgatcagcttagccgtccatcggaatcttcttcgcctgtatggattctgcatgacagctacagagaggctcttggtttatccctacatgtcaaatggcagtgttgcttcccgtctaaaagccaagccagctttggactggccaacaaggaaaagaatagctttaggagctggaagaggcttgctatatttgcacgaacagtgtgatccaaagattattcatagggatgtgaaggcagcaaatatcttgcttgatgattattgtgaggctgtggtgggagattttgggttggcaaagctattagaccacagggattcacatgtgacaacagcagtgagaggtactgtggggcacatagcccctgagtatctctctacaggccaatcttctgagaaaacagatgtgtttgggtttggaattcttcttcttgaactgatatctggccaaagagctcttgagtttgggaaagcagcaaaccagaaaggagccatgctagactgggtgaagaaaatccatcaagagaagaaaattgacttgttggttgacaaggacctgaaaaacaactatgataggattgagcttgatgaaatagttcaagtggctcttctatgtactcaataccttccaagctacagaccaaagatgtctgaagtggttaggatgcttgaaggagatggtcttgcagagaaatgggaggcctcacagagagctgaatccacaagaagtagaggcaatgaactctcatcttcagagcgctactctgatctcactgatgactcttcattactagcccaagcaatggaactttctggaccaagatgattcacaaagtcactgtgacactgaagttggtgaagagttaaagaaagtggaagtttcttcaaatgcaagtgcctgagttgcagcggacttgatgtaacattagtagcatctcaaagagtgatgctagtttctgactgtacagaatctgattggagacattgacgtatagattgagtgttatgtgttgttcttaatagatggggcgaagatttttgtgggaaatgtccttctggctccttcaagatgtttgaagaataacgttcatataaataggttgtacttaaactgtcaataatagtattttgggatttgggaaaaaaaaaaaaaaa

SEQ ID NO: 286 - protein, 621 aa, Glycine max
MERRRDVALFCLALFFLWTSVAALLSPKGVNYEVQALMSIKNSLADPHSVLNNWDTDAVDPCNWAMVTCSSDHFVIALGIPSQNISGTLSPSIGNLTNLQTVLLQDNNITGPIPSEIGRLQKLQTLDLSDNFFTGQLPDSLSHMKGLHYLRLNNNSLTGPIPSSLANMTQLAFLDISYNNLSEPVPRINAKTFNIVGNPQICVTGVEKNCSRTTSIPSAPNNSQDSQSTKRPKSHKVALAFASSLSCICLLILGLGFLIWWRQRYNKQIFFVVNEQHREEVCLGNLKKFHFRELQLATNNFSSKNLIGKGGFGNVYKGYLQDGTVIAVKRLKDGNAIGGEIQFQTEVEMISLAVHRNLLRLYGFCMTATERLLVYPYMSNGSVASRLKAKPALDWPTRKRIALGAGRGLLYLHEQCDPKIIHRDVKAANILLDDYCEAVVGDFGLAKLLDHRDSHVTTAVRGTVGHIAPEYLSTGQSSEKTDVFGFGILLLELISGQRALEFGKAANQKGAMLDWVKKIHQEKKIDLLVDKDLKNNYDRIELDEIVQVALLCTQYLPSYRPKMSEVVRMLEGDGLAEKWEASQRAESTRSRGNELSSSERYSDLTDDSSLLAQAMELSGPR

SEQ ID NO: 287 - DNA, 1985 bp, Glycine max
  CDS (80)..(1867)
taaactgtttgtgttggtgattttttccccgtgaaaacttctgaaaagggattcgaacttggagatcaaagaagtttatatgtttcgccaaaatttgagcaggggacctctcaaaatattgacgaggtggctcatattccttactatcttacaagtcagttgtgctatcaaagatcctgatgtagaaggtgaagctctgcttgatcttttgcatttcctcaatgattccaataagcaaataacggactgggacagttttttagtgagcccgtgcttcagttggtctcatgtcacttgtagaaacgggcatgtcatatccctggccttggcttcagttggattttctggaacgctttctccctcaattatcaaattgaagtatttgtctagcttagaattgcagaacaacaacctttctggacccttgcctgattacatttccaacttgacagagctacaatatctaaatcttgctgacaacaattttaatggttctataccagctaaatggggtgaagtacccaatctaaagcatctggatctttcatctaatggtcttacgggaagcatcccaaagcaactcttttcagttccattgtttaactttacagatacgcaacttcagtgtggccctggcttcgagcagccttgcgcttctaaatctgaaaatccagcttcagctcacaaatcaaaattggcaaaaattgtacgttatgcaagttgtggtgcatttgcacttctgtgtcttggggctatctttacgtatcgacaacatcaaaagcataggcgaaaaattgatgtctttgttgatgtttcaggtgaagacgagagaaagatttctttcgggcaattgagaagattttcttggcgtgaacttcaacttgccactaaaaatttcagtgaaggcaatgtaattggtcagggtggctttggaaaagtgtacaaaggagtactctctgataacacaaaagtcgctgtgaaacgcctcattgattatcacaatcctggtggagaggctgcattcgagagagaagttcaactaataagtgttgcagttcatagaaacctcctaagactaattggcttctgcacaaccacaactgaaagaatccttgtataccctttcatggaaaatcttagtgtagcatatcgactgagagatttaaaacctggtgagaaaggcttggactggccaacaaggaaacgcgtggcttttggcactgcccatggtttggagtatttacatgagcaatgcaatcccaagataatacatcgtgatctaaaggctgcaaatatcctactagatgatgaatttgaagctgttctaggtgattttgggctagccaagctggttgatgcaaggatgactcatgtcaccactcaagttaggggcacaatgggtcacattgccccagagtatttgtccactggaaaatcttcagaaaagactgatgtttttggatatggcataacacttcttgaacttgtcaccggtgagcgtgcattagacctctctcggcttgaagaggacgaggatgttcttctgattgattatgtgaaaaagctgctgagagagaaaaggttggaggacattgttgatagaaatttggagagttatgatccaaaggaagttgagacgattctacaggttgcattgctttgcacccaagactatcccgaggatcgtccaaccatgtcagaggtggtgaaaatgctgcagggagttggcttggcagatagatgggctgactggcagcaacttgaagaggctaggaatcaagaattctcactcatgactcaccaatttgtttggaatgatgagtctactcttgatcaagaagccatacagctttccagagcaagataagcagaactggagagtcaattttgaaatttggttgcttggtatggcatagaatataacatatactgatatactatacttatgtgtaatttaatgttctctaaagaaaaaaaaaaaaaaa

SEQ ID NO: 288 - protein, 595 aa, Glycine max
MFRQNLSRGPLKILTRWLIFLTILQVSCAIKDPDVEGEALLDLLHFLNDSNKQITDWDSFLVSPCFSWSHVTCRNGHVISLALASVGFSGTLSPSIIKLKYLSSLELQNNNLSGPLPDYISNLTELQYLNLADNNFNGSIPAKWGEVPNLKHLDLSSNGLTGSIPKQLFSVPLFNFTDTQLQCGPGFEQPCASKSENPASAHKSKLAKIVRYASCGAFALLCLGAIFTYRQHQKHRRKIDVFVDVSGEDERKISFGQLRRFSWRELQLATKNFSEGNVIGQGGFGKVYKGVLSDNTKVAVKRLIDYHNPGGEAAFEREVQLISVAVHRNLLRLIGFCTTTTERILVYPFMENLSVAYRLRDLKPGEKGLDWPTRKRVAFGTAHGLEYLHEQCNPKIIHRDLKAANILLDDEFEAVLGDFGLAKLVDARMTHVTTQVRGTMGHIAPEYLSTGKSSEKTDVFGYGITLLELVTGERALDLSRLEEDEDVLLIDYVKKLLREKRLEDIVDRNLESYDPKEVETILQVALLCTQDYPEDRPTMSEVVKMLQGVGLADRWADWQQLEEARNQEFSLMTHQFVWNDESTLDQEAIQLSRAR

SEQ ID NO: 289 - DNA, 3057 bp, Glycine max
  CDS (619)..(2409)
acgacccacgcgtccgtttttctttcttttctcctcattttgtcccccattgttaactacttcatagaaatactagctagcttcttgttacatgagcatccatgtgatgtgaaaatatgtaaaatatgtatagtgcatgcttttttggtctatatatatataccaaaaaaacatgcacatatattatcaatcatggctatacatattttcacatcacatggatcctagctcatatatatatatatatatggccccatctcctggcttacttaatctaattagtcactctaataaattccatatttagagttcttgcaactgtgtccgttttttgttgaataaatgttctatgttctatgttggttttctctcttgcattcatctttaaaaccaaggagttgctgttgtaaacttgtatatcctgctggctatgatgttactatcatctatatgtttctggacatactatatttatttatttgtttgcatagtgttattgttatttttatgttaaaatgttattaattaaactgtttctgttggtgattttttccccgtggaaacttctgaaaagggattcgaacaggtgagatttccttggagatcaaagaagtttatatgtttcgccaaaatttgagcaggggacctctcaaaatattgacgaggtggctcatattccttactatcttacaagtcagttgtgctatcaaagatcctgatgtagaaggtgaagctctgcttgatcttttgcatttcctcaatgattccaataagcaaataacggactgggacagttttttagtgagcccgtgcttcagttggtctcatgtcacttgtagaaacgggcatgtcatatccctggccttggcttcagttggattttctggaacgctttctccctcaattatcaaattgaagtatttgtctagcttagaattgcagaacaacaacctttctggacccttgcctgattacatttccaacttgacagagctacaatatctaaatcttgctgacaacaattttaatggttctataccagctaaatggggtgaactacccaatctaaagcatctggatctttcatctaatggtcttacgggaagcatcccaaagcaactcttttcagttccattgtttaactttacagatacgcaactccagtgtggccctggcttcgagcagccttgcgcttctaaatctgaaaatccagcttcagcccacaaatcaaaattggcaaaaattgtacgttatgcaagttgtggtgcatttgcacttctgtgtcttggggctatctttacgtatcgacaacatcaaaagcacaggcgaaaaagtgatgatgtctttgttgatgtttcaggtgaagacgagagaaaaatttctttcgggcaattgagaagattttcttggcgtgaactccaacttgccactaaaaatttcagtgaaggcaatgtaattggtcagggtggctttggaaaagtgtacaaaggagtactctctgataacacaaaagtcgctgtgaaacgcctcattgattatcacaatcctggtggagaggctgcattcgagagagaagttcaactaataagtgttgcagttcatagaaacctcctaagactaattggattctgcacaaccacaactgaaagaatccttgtataccctttcatggaaaatctaagtgtagcatatcgactgagagatttaaaacctggtgagaaaggcttggactggccaacaaggaaacgcgtggcttttggcactgcccatggtttggagtatttacatgagcaatgcaatcccaagataatacatcgtgatctaaaggctgcaaatatcctactagatgatgaatttgaagctgttctaggtgattttgggctagccaagctggttgatgcaaggatgactcatgtcaccactcaagttaggggcacaatgggtcacattgccccagagtatttgtccactggaaaatcttcagaaaagactgatgtttttggatatggcataacacttcttgaacttgtcaccggtgagcgtgcattagacctctctcggcttgaagaggacgaggatgttcttctgattgattatgtgaaaaagctgctgagagagaaaaggttggaggacattgttgatagaaatttggagagttatgatccaaaggaagttgagacgattctacaggttgcattgctttgcacccaaggctatcccgaggatcgtccaaccatgtcagaggtggtgaaaatgctgcagggagttggcttggcagatagatgggctgactggcagcaacttgaagaggctaggaatcaagaattctcactcatgactcaccaatttgtttggaatgatgagtctactcttgatcaagaagccatacagctttccagagcaagataagcagagctggagagtcaattttgaaatttggttgcttggtatggcatagaatataacatatactgatatactatacttatgtgtaatttaatgttctctaaagaaaaatgtataattaactaaaaaagcctgtgtttatataatgctggatgtacgatggaaaagaaaggaaaggaatgagggggatttggcacaggcaaacatattcgaacaggagaaaatttaggttgcgaatgtatatatcacaactgtgttgcttttgtaaccatggaaattaatggcttgtgcttgcaatgctatattctttcttttctagcttcttctagtttttggttttcaggattcaatcacactaaaccttagcctatcctacatgagaaggtttccaaactcaatgtcattacgcagcaggggagtgctcaaaaagttttagcttgaatagctagagatgttgtatgtctgaccatgaatgccatgctagatgggggaatgggctttgcaggaaaaaaaatcatatatatgtaatttcttacttgactttccagagggtatgtagcataaatccaaatgatatgccccacaaatcctctgagtgcaatctgccatgcaaattatcagggctgcgaattcataagataagctttgttc

SEQ ID NO: 290 - protein, 596 aa, Glycine max
MFRQNLSRGPLKILTRWLIFLTILQVSCAIKDPDVEGEALLDLLHFLNDSNKQITDWDSFLVSPCFSWSHVTCRNGHVISLALASVGFSGTLSPSIIKLKYLSSLELQNNNLSGPLPDYISNLTELQYLNLADNNFNGSIPAKWGELPNLKHLDLSSNGLTGSIPKQLFSVPLFNFTDTQLQCGPGFEQPCASKSENPASAHKSKLAKIVRYASCGAFALLCLGAIFTYRQHQKHRRKSDDVFVDVSGEDERKISFGQLRRFSWRELQLATKNFSEGNVIGQGGFGKVYKGVLSDNTKVAVKRLIDYHNPGGEAAFEREVQLISVAVHRNLLRLIGFCTTTTERILVYPFMENLSVAYRLRDLKPGEKGLDWPTRKRVAFGTAHGLEYLHEQCNPKIIHRDLKAANILLDDEFEAVLGDFGLAKLVDARMTHVTTQVRGTMGHIAPEYLSTGKSSEKTDVFGYGITLLELVTGERALDLSRLEEDEDVLLIDYVKKLLREKRLEDIVDRNLESYDPKEVETILQVALLCTQGYPEDRPTMSEVVKMLQGVGLADRWADWQQLEEARNQEFSLMTHQFVWNDESTLDQEAIQLSRAR

SEQ ID NO: 291 - DNA, 2001 bp, Glycine max
  CDS (49)..(1839)
agcgcgctaaactagttggattcgaacttggagatcaaagaagtttatatgtttcgccaaaatttgagcaggggacctctcaaaatattgacgaggtggctcatattccttactatcttacaagtcagttgtgctatcaaagatcctgatgtagaaggtgaagctctgcttgatcttttgcatttcctcaatgattccaataagcaaataacggactgggacagttttttagtgagcccgtgcttcagttggtctcatgtcacttgtagaaacgggcatgtcatatccctggccttggcttcagttggattttctggaacgctttctccctcaattatcaaattgaagtatttgtctagcttagaattgcagaacaacaacctttctggacccttgcctgattacatttccaacttgacagagcttcaatatctaaatcttgctgacaatagttttaatggttctataccagctaattggggtgaactaccgaatctaaagcatctggatctttcatctaatggtcttactggaagtatcccaatgcaactcttttcagttccattgtttaacttttcagatacgcacctccagtgtggccctggctttgagcagtcttgcgcttctaaatctgaaaatccagcttcagcccacaaatcaaaattggcaaaaattgtacgttatgcaagttgtggtgcatttgcacttctgtgtcttggggctatctttacgtatcgacaccatcgaaagcactggcgaaaaagtgatgatgtctttgttgatgtttcaggtgaagacgagagtaaaatttttttcgggcaattgagaagattttcttggcgtgaactccaacttgccactaaaaatttcagtgaaggcaatgtaattggtcagggtggctttggaaaagtgtacaaaggagtactctctgataacacaaaagtcgctgtgaaacgcctcattgattatcacaatcctggtggagaggctgcgttcgagagagaagttcaactaataagtgttgcagttcatagaaacctcctaagactaattggattctgcacaaccacaactgaaagaatccttgtgtaccctttcatggaaaatctaagtgtagcatatcgactgagagatttaaaacctggtgagaaaggcttggactggccaacaaggaaacgcgtggcttttggcactgcccatggtttggagtatttacatgagcaatgcaatcccaagataatacatcgtgatctaaaggctgcaaatatcctactagatgatgaatttgaagctgttctaggtgattttgggctagccaagctggttgatgcaaggatgactcatgtcaccactcaagttaggggcacaatgggtcacattgccccagagtatttgtccactggaaaatcttcagaaaagactgatgtttttggatatggcataacacttcttgaacttgtcaccggtgagcgtgcattagacctctctcggcttgaagaggacgaggatgttcttctgattgattatgtgaaaaagctgctgagagagaaaaggttggaggacattgttgatagaaatttggagagttatgatccaaaggaagttgagacgattctacaggttgcgttgctttgcacccaaggctatcccgaggatcgtccaaccatgtcagaggtggtaaaaatgctgcagggagttgggttggcagatagatgggctgactggcagcaacttgaagaggctaggaatcaagaattctcactcatgactcaccaatttgtttggaatgatgaatctactcttgatcaagaagccatacagctttccagagcaagataagcagagctggagagtcaattttgaaatttggtagcttgttatggcatagaatataacatatacttgtatgtacttcaatgtactctaaaggaaaatatataattacctaaaaaggcctgtgtttgtataatgctggatgtacaatggaaaaaaaaaaaaaaa

SEQ ID NO: 292 - protein, 596 aa, Glycine max
MFRQNLSRGPLKILTRWLIFLTILQVSCAIKDPDVEGEALLDLLHFLNDSNKQITDWDSFLVSPCFSWSHVTCRNGHVISLALASVGFSGTLSPSIIKLKYLSSLELQNNNLSGPLPDYISNLTELQYLNLADNSFNGSIPANWGELPNLKHLDLSSNGLTGSIPMQLFSVPLFNFSDTHLQCGPGFEQSCASKSENPASAHKSKLAKIVRYASCGAFALLCLGAIFTYRHHRKHWRKSDDVFVDVSGEDESKIFFGQLRRFSWRELQLATKNFSEGNVIGQGGFGKVYKGVLSDNTKVAVKRLIDYHNPGGEAAFEREVQLISVAVHRNLLRLIGFCTTTTERILVYPFMENLSVAYRLRDLKPGEKGLDWPTRKRVAFGTAHGLEYLHEQCNPKIIHRDLKAANILLDDEFEAVLGDFGLAKLVDARMTHVTTQVRGTMGHIAPEYLSTGKSSEKTDVFGYGITLLELVTGERALDLSRLEEDEDVLLIDYVKKLLREKRLEDIVDRNLESYDPKEVETILQVALLCTQGYPEDRPTMSEVVKMLQGVGLADRWADWQQLEEARNQEFSLMTHQFVWNDESTLDQEAIQLSRAR

SEQ ID NO: 293 - DNA, 2316 bp, Zea mays
  CDS (213)..(2069)
tttttttttttttttttttttttttttttggaaccatgccgaatgaagtctcctttgtgtgttttgaaccattcttctatgtttgctgtcctcttacacgctctgtttccttggtgcagcagtctagcgtccattccacttcgcaagggcttttctttctgttttaagtgaaacggatccagcaacgcacctgttcctgaaacagaaacgtgatgatggattcagtaagcatgaagctgttagcttttgtgttcctcctgttgcgatgccagcgggcatcgcttgctcttgctgtcgacttccaagtcgaagcattggttgaaatgaggacgcaacttggtgacaaacgtggtgtccttagtgattggaaggataatcaaatgagcccctgctactgggccaatgttaattgccaagataacaaagtcacaacaataattttgagctcgtcagggttaacaggatccttatcacccagcattgcaaagctaacaactttacagcagctgatactggataacaacaacattactggagggattcctccggagtttggaaacctatcaggtttgacaattctaaaccttggaagaaataatttaaatgggtcaataccggactcccttggacaactttctaaactccaaaatctggatctaagccataattatttgaccggaaatatcccaagctctttctcaaatcttctgtcattgagtgatattaatctggcatataataatataagaggtgcaatcccacaacatctacttcaggtggctcaatacaactatgcaggcaaccacttgaattgtggccaaaatttatctgcatgtgaacgaggcagcacattgacaggtggatccaaaaattccaagctaaaggtggttattggaagcattgctggagcagtcacactttctgtaactatagttctagttttgctatggtggcaaagaatgcgttaccggcctgaaatcttcattgacgtgtcaggtcagaatgaccatatgcttgagtttgggcaaataaagcggttctcatggcgggagcttcagattgcaaccagcaatttcagtgaacagaatgttcttggcaagggtggttttggtaaggtgtataaaggagttcttccaggtccaaacagtataaagattgcagtgaaacgactactgaacgtggacagtcgtgatggggaaatggctttcctcagagaagttgaattgataagcattgctgtacacaagaacatattaaggttgataggattctgtacaacaccaacagagaggcttttggtctaccctttcatggagaatcttagtgttgcttcccgtttaagagatataaaactaaacgaaccagcattagattggtctacaagaatgcgaattgctcttggcgctgcctgtggtttggagtaccttcatgagcactgcaatcccaagatcatccaccgtgatgtcaaggctgcaaatgtcctgcttgatgggaactttgaagcagtggtaggagattttgggctggcgaagatggtagacatagggaggaatacagtaacaacaggggttcgtggaactatgggccacgtagctcctgagtacataaagacaggaaggccatcagtgaagacagatatctttggttatggtgtcatgctgttagagattgtgacaggagagcgtgcaattgcattccatcctgaccgtatagaagaagcaggcgagatcctgctcactgatcaggtcaagctatggatggaagaagggcgactactcgacctagtggatcgcaatctaggtggcgtctacaaccttgaagagctggagaaggttacccagatagcacttctctgcactcacatggatcctgaacaacgccctacaatgtctgaggtggtgcagatgctggaaggagagattgtcccagcagagcggtgggaggagtggcagctggctgagctccaacgacgacaacagcatgagatgaggcaacagggcaaactattcaacttcagtgaagagtctcaaaacatccaggaagccattgagttgtcagctggcagatgagctgtcataagaaagtgacatgattttcacttgttccttaaatagaaaggctataagagaaatattgactattaggaatagtctataaggtcctggactcctggtgtaatatcttgcacaagtaactccgtccatatgctgttaatacaacgataggaccacacctagctcagaccatgtgtatatcaagaatagactgttctacattttaattgcattctgtattactggataaaaaaaaaaaaaa

SEQ ID NO: 294 - protein, 618 aa, Zea mays
MMDSVSMKLLAFVFLLLRCQRASLALAVDFQVEALVEMRTQLGDKRGVLSDWKDNQMSPCYWANVNCQDNKVTTIILSSSGLTGSLSPSIAKLTTLQQLILDNNNITGGIPPEFGNLSGLTILNLGRNNLNGSIPDSLGQLSKLQNLDLSHNYLTGNIPSSFSNLLSLSDINLAYNNIRGAIPQHLLQVAQYNYAGNHLNCGQNLSACERGSTLTGGSKNSKLKVVIGSIAGAVTLSVTIVLVLLWWQRMRYRPEIFIDVSGQNDHMLEFGQIKRFSWRELQIATSNFSEQNVLGKGGFGKVYKGVLPGPNSIKIAVKRLLNVDSRDGEMAFLREVELISIAVHKNILRLIGFCTTPTERLLVYPFMENLSVASRLRDIKLNEPALDWSTRMRIALGAACGLEYLHEHCNPKIIHRDVKAANVLLDGNFEAVVGDFGLAKMVDIGRNTVTTGVRGTMGHVAPEYIKTGRPSVKTDIFGYGVMLLEIVTGERAIAFHPDRIEEAGEILLTDQVKLWMEEGRLLDLVDRNLGGVYNLEELEKVTQIALLCTHMDPEQRPTMSEVVQMLEGEIVPAERWEEWQLAELQRRQQHEMRQQGKLFNFSEESQNIQEAIELSAGR

SEQ ID NO: 295 - DNA, 2679 bp, Zea mays
  CDS (497)..(2314)
tggcggtggtggtggccatgctggccaccgccttcttcgctgtgaccgctcacgccgagaattgcagatcgcaagccggagacgcgctgtgccccaactgcctgtgctgcagccagttcgatatgatgaaaaattcacctcaccactactgcattgagaactgtgttttactggagtgccaaccagacctgactgctacctgccgaatcgcgcgcgcctgccaaaaaggcaatgggctccccgtccgcggccgggccaccagcggtcaatttcgacgcctggagtcaaccgcccgagtcgtccacctacgccttcacagttcacacgcgcggcggcggcggcggcggtggagcgggtgatgagggaagtggcgtgaaccaccgaatctcgcggtcgcggagcgggcgtcgcgggcgaacgagccccggtctctctcttctctgcgcgcaacctttccaaggaactcctctgatgctacagtaataatagaagaaagatggacctgctcagcatcattctagttatagcatctctgctcccattcgcagcatctgatggtcaaggtgatgccttgtacgatatgaagctgaaactaaatgctactggcagtcagctttctgactggaaccaaaatcaagtcaacccatgcacctggaattctgttatttgtgacaacaacaaccatgttgtgcaagtaacattggcttctatggggtttactggagttctgtcaccaagaatcggagatctggagtatttaaatgttctgtccttgcctggtaacaacatctctggtggcataccagaagaatttggcaacctctctcgattgacaagcttagatttggaagacaacctgttggttgggccaataccagcttcacttggcaggctttcaaagctccagcttctgatactaagtcaaaacaatctcaatggctctattcctgacacactagcaagcattttaagcttgacagacattcggctggcttacaataaactcactggtcaaataccttcccagctgtttcaagttgcacgttataatttttcaggtaataacttgacctgtggagcaaacttcctccatccatgtgcctcaaatatgtcttaccaaggttcttcccgtggttcgacaataggcattgtgcttgggacagttggaggtcttatggggcttctaatcatatgggctgtattcattatctgcaatggaaggaggaaaagccatctacgtgaaatatttgtggatgtatcaggtgaggatgatcgtagaattgcatttggccagttgaaaagatttgcatggcgagaattgcaacttgcaactgataatttcagtgagaaaaatgttcttggacaagggggttttgggaaagtatataaaggagcacttccagatggcactaagattgctgtaaaacggttaactgattacgaaagtccaggtggagaggctgctttcttgcgtgaggttgagctaattagtgttgcagttcaccggaatcttttaagattgattggtttctgtacaacacaaacagagcgcctacttgtttatcctttcatgcaaaatcttagtgtggcctaccgactacgagaatttaaacctggggagccaatattagactggtctgcaaggaagcgagtggctataggcacagctcgtggactggagtatttgcacgagcactgcaatcctaagattatacatcgcgacgtcaaggctgccaatgtcttgctcgatgaaggttttgaaccggtggttggtgacttcggcctggcgaagctggtggacgtgcagaagacgtccgtgactacccaggtccgtggaaccatgggtcacatcgcccccgaatacctgtccactgggaagtcctccgagagaaccgatgtttttggctatggcataatgcttcttgagctagtcactggtcagcgtgccatcgacttttcacgtctggaggaagaagatgacgtgttgttacttgaccatgtcaagaagctgcagagggaagggcatctcgacgccatcgttgaccgcaacttgaacagctgttacaacgggcaggaggtggagatgatgatccagatcgcgctgctctgcacgcaggcgtcgcccgaggaccgcccgtccatgtccgaggtggtccggatgctggagggcgagggcctcgccgagaggtgggaggagtggcagcaggtggaggtgacgaggaggcaggactacgagcggatgcagcagcgcttcgactggggcgaggactccatctacaaccaggacgcgatcgaactgtccgccggcaggtgacgacgtcgggtcgtcacacggagcttgtcgtcgtcgacgtcgcagtgccgacatgtaactgtatatgtaaggcattgttgcgaagcttgttagcaaaatataatctgtgacactcacttagtgttgatacgtgcctgtattttattattattatttatgtgtataaggaaggatgatttaaacgcgttcaggtgtttaccggctgtccggctcccaagtcccatcctgtaaagctctatatacgggggtggggaccggttgaaaccacatcacatgcaagctgcaagaattggcttgacaaatatttaacgaactctattgtcgacagaaaaaaaaaaaaaaaaaaaaaaacaaaaaaacccccc

SEQ ID NO: 296 - protein, 605 aa, Zea mays
MDLLSIILVIASLLPFAASDGQGDALYDMKLKLNATGSQLSDWNQNQVNPCTWNSVICDNNNHVVQVTLASMGFTGVLSPRIGDLEYLNVLSLPGNNISGGIPEEFGNLSRLTSLDLEDNLLVGPIPASLGRLSKLQLLILSQNNLNGSIPDTLASILSLTDIRLAYNKLTGQIPSQLFQVARYNFSGNNLTCGANFLHPCASNMSYQGSSRGSTIGIVLGTVGGLMGLLIIWAVFIICNGRRKSHLREIFVDVSGEDDRRIAFGQLKRFAWRELQLATDNFSEKNVLGQGGFGKVYKGALPDGTKIAVKRLTDYESPGGEAAFLREVELISVAVHRNLLRLIGFCTTQTERLLVYPFMQNLSVAYRLREFKPGEPILDWSARKRVAIGTARGLEYLHEHCNPKIIHRDVKAANVLLDEGFEPVVGDFGLAKLVDVQKTSVTTQVRGTMGHIAPEYLSTGKSSERTDVFGYGIMLLELVTGQRAIDFSRLEEEDDVLLLDHVKKLQREGHLDAIVDRNLNSCYNGQEVEMMIQIALLCTQASPEDRPSMSEVVRMLEGEGLAERWEEWQQVEVTRRQDYERMQQRFDWGEDSIYNQDAIELSAGR

SEQ ID NO: 297 - DNA, 1887 bp, Zea mays
  CDS (1)..(1887)
atggaggcggcgcctccaacttctccaccctccctggtgctactcttgctgctgctgctgctcatcatctctcccccttccagcgctttcctctcccccaagggcgtcaaccctgaagtgcaagctctgatgacgatcaagaacacgctcaaggacccccacggcgtgctcaagaactgggaccaggactccgtggatccctgcagctggaccacagtcagctgctcgctagagaacttcgtcaccggactggaggtcccaggtcagaacctctctggcctgctctccccaagcatagggaacctgacgaatcttgagactattctcctgcagaacaacaacatcaccggcctaatcccagcagagatcggcaagcttacaaagctcaagacactcgatctctccagcaaccacctgtacggcgcaatccccacttctgtaggcaaccttgagagcctgcagtacttgaggctcaacaacaacaccctgtctggcccattcccttcagcatcagctaatttgtcccagcttgttttcctagacttgtcatataataatctgagtggtccagtgccgggatctttggcaagaacattcaacatagttgggaatcctctcatctgcggcaccaacaacgccgagagagattgctatgggactgccccaatgccgccatacaacctcaacagctcactgcctccggcaatgtctaaaagccataagtttgcaattgcgtttggtaccgcaattggctgcatcggcctcctcgtcctcgctgccgggtttctgttctggtggaggcatcgtagaaaccggcaggtcctttttgatgtcgatgatcaacacatggagaacgttagcctcgggaacgtgaagaggttccagttcagggagctccaggccgcgacagacaagttcagcggcaagaacctgctagggaaaggtggctttgggttcgtttacagagggcagctccctgacgggactctcgtggctgtgaagcgactgaaggacggcaatgtcgcgggaggcgaggcgcagttccagactgaggttgagatgatcagcttggcgctgcacagaaaccttctcaggctctatgggttttgcacgaccgccaccgagaggctgctggtctacccatacatgtctaacggaagcgtcgcgtcgcgcctgaaagggaagccgcctttggactgggcgaccaggaggaggatagctcttggcgcagggagggggctgctgtacctgcacgagcagtgtgaccccaagatcatacacagggacgtcaaagcagccaacgtcctgctagatgactgctgcgaggccatcgttggtgactttgggctcgcgaagctcctggaccaccgggactcgcatgtcaccactgcggtgcgaggcaccgtcggtcacatcgcgcccgagtacctctccactggccagtcgtctgacaagaccgacgtcttcgggtttggcatcctgctgctggagctggtcactggtcagaccgcgctggagttcgggaaggcagcaaaccagaagaagggagccatgcttgattgggtgaagaagatgcaccaggagaagaagctggacgttctggtggacaaggggctgaggagcaggtacgacgggatcgagatggaggagatggtgcaggtggcgttgctgtgcacgcagtacctccccggccaccggccgaagatgtcggaggtggtccggatgctggaaggtgacgggctcgcagagcggtggcaggcttcgcagcgcgcggactcgcacaagtccttcaaagtgcccgacttcactttcagccgctgctactccgaccttaccgacgactcgtcattgctggtgcaggccgtcgagctgtccggcccaagatga

SEQ ID NO: 298 - protein, 628 aa, Zea mays
MEAAPPTSPPSLVLLLLLLLLIISPPSSAFLSPKGVNPEVQALMTIKNTLKDPHGVLKNWDQDSVDPCSWTTVSCSLENFVTGLEVPGQNLSGLLSPSIGNLTNLETILLQNNNITGLIPAEIGKLTKLKTLDLSSNHLYGAIPTSVGNLESLQYLRLNNNTLSGPFPSASANLSQLVFLDLSYNNLSGPVPGSLARTFNIVGNPLICGTNNAERDCYGTAPMPPYNLNSSLPPAMSKSHKFAIAFGTAIGCIGLLVLAAGFLFWWRHRRNRQVLFDVDDQHMENVSLGNVKRFQFRELQAATDKFSGKNLLGKGGFGFVYRGQLPDGTLVAVKRLKDGNVAGGEAQFQTEVEMISLALHRNLLRLYGFCTTATERLLVYPYMSNGSVASRLKGKPPLDWATRRRIALGAGRGLLYLHEQCDPKIIHRDVKAANVLLDDCCEAIVGDFGLAKLLDHRDSHVTTAVRGTVGHIAPEYLSTGQSSDKTDVFGFGILLLELVTGQTALEFGKAANQKKGAMLDWVKKMHQEKKLDVLVDKGLRSRYDGIEMEEMVQVALLCTQYLPGHRPKMSEVVRMLEGDGLAERWQASQRADSHKSFKVPDFTFSRCYSDLTDDSSLLVQAVELSGPR

SEQ ID NO: 299 - DNA, 1881 bp, Zea mays
  CDS (1)..(1881)
atggcggcgtcggcgtcggctgggaggtggtgggcggtggtccttgcggtcgcggtgctgctcgggccgggacgggtcgtcgccaacaccgagggtgatgccctgtacagcctgcgtcagagcttgaaagatgctaacaatgtcttgcagagttgggatcccactcttgttaatccatgtacatggttccatgttacgtgtaacaacgataacagtgttatcagagttgaccttggaaatgcacaattatctggcgtcctagtgccacaacttggccagctgaaaaatctccaatatttggagctttacagcaacaaaataagtgggacaataccccctgaactggggaacctgactaacctggtcagtttggatctgtatatgaacaacttctctggcaatatccctgacagcctagggaatctattgaagctgcgtttcctacgtcttaacaacaacagcttggttggtcccattcccgtagccttgaccaatatctccactctccaagtactggatctctcgagtaacaacctctcaggaccagtctcatccaatggctccttttcactcttcacccctataagttttaacaataatccaaatctttgtggccctgttactacgaagccctgccctggggatcctcccttttccccaccgcctccattcaatcctccgtctcccccaacccaatcaactggtgcttctggccctggagcaatcgctggaggtgttgctgctggtgctgcattggtttttgctgttccagcaattgcatttgcaatgtggcgccgtcgtaaacctgaagagcatttcttcgatgttcctgccgaggaggatccagaagttcatcttggtcagctcaaaaagttttcattgcgggagcttcaagttgctactgatacttttagtaacaagcacattttaggaagaggcggttttggaaaagtgtacaagggaaggcttgctgatggctcattggtagcagtgaaaagactaaaagaggagcgcacacctggtggtgagcttcagtttcaaacagaggttgagatgattagcatggcagtgcacaggaaccttctccgacttcgtggtttctgcatgacacctactgaacggttgctggtctacccatacatggctaatggcagtgtggcatcacgtttacgagagcgccaggcatctgaaccacctcttaaatgggaaacaagaagacggattgcactgggatctgcaagaggtctttcttacttgcatgatcactgcgatcctaagatcatccatcgggatgtcaaagctgcaaatattcttttggatgaggagtttgaggcagtcgtaggtgatttcgggcttgccaagcttatggactacaaggatacccatgtcacaacagctgttcgtggaacaattgggcacattgctcccgagtacctatctaccggcaagtcttctgagaagactgatgtttttggctatgggatcatgcttctggagcttattactggccagagggcatttgatctagctcgtcttgcaaatgatgatgatgttatgcttcttgactgggtgaaaggactgttgaaggagaagaaggtggagatgctggtggacccagatctgcagaaagcctacgaggaggtcgaggtggagagccttattcaggtggcactcctctgcacgcagggctcccccctggaccgtccaaagatgtcggaggtggtgaggatgctcgaaggtgacgggctggcagagcgttgggacgaatggcagaaagtagaggtggtgaggcaggaggctgagtcggcaccgctccgcaatgactggatcgtcgattccacgtacaaccttcgtgccgtggagctgtccggcccaaggtag

SEQ ID NO: 300 - protein, 626 aa, Zea mays
MAASASAGRWWAVVLAVAVLLGPGRVVANTEGDALYSLRQSLKDANNVLQSWDPTLVNPCTWFHVTCNNDNSVIRVDLGNAQLSGVLVPQLGQLKNLQYLELYSNKISGTIPPELGNLTNLVSLDLYMNNFSGNIPDSLGNLLKLRFLRLNNNSLVGPIPVALTNISTLQVLDLSSNNLSGPVSSNGSFSLFTPISFNNNPNLCGPVTTKPCPGDPPFSPPPPFNPPSPPTQSTGASGPGAIAGGVAAGAALVFAVPAIAFAMWRRRKPEEHFFDVPAEEDPEVHLGQLKKFSLRELQVATDTFSNKHILGRGGFGKVYKGRLADGSLVAVKRLKEERTPGGELQFQTEVEMISMAVHRNLLRLRGFCMTPTERLLVYPYMANGSVASRLRERQASEPPLKWETRRRIALGSARGLSYLHDHCDPKIIHRDVKAANILLDEEFEAVVGDFGLAKLMDYKDTHVTTAVRGTIGHIAPEYLSTGKSSEKTDVFGYGIMLLELITGQRAFDLARLANDDDVMLLDWVKGLLKEKKVEMLVDPDLQKAYEEVEVESLIQVALLCTQGSPLDRPKMSEVVRMLEGDGLAERWDEWQKVEVVRQEAESAPLRNDWIVDSTYNLRAVELSGPR

SEQ ID NO: 301 - DNA, 2339 bp, Zea mays
  CDS (52)..(1983)
aggggcgacgacgcgtccgcttgcttccatgcttgacattgaacacggagcatgctcctgaacttgttgccgaggaggccacactcttgcgctgccttggcaatgggggaggttgttgctgcttcctccctggccctggtgctgctcttcttctgctcttgcgggcctgcaagcggccttctctcccccaagggtgtaaactatgaagttcaagctctcatgatgatcaagaactacctcaaggatcctcatggtgtactgaagaactgggaccaagactctgtggatccttgcagctggacaatggtcacttgctctccagagaaccttgtcaccggcttagaagcaccaagccagaacctttctggaattctctccccaagtatagggaatctgaccaaccttgagacagttcttctgcagaacaacaacataaacgggttaatcccagcagagattggaaagctaagaaagctcaaaacgcttgatctgtccagcaaccacttctctggagaaatcccaagctctgtgggccaccttgaaagccttcagtatttgaggcttaacaacaacacattgtctggtgccttcccttcatcttcaactaatttgtcacaccttattttcctggatctgtcctacaataatttgagtggtccaatcccagggtccctgacaaggactttcaacattgtagggaatccactgatctgtgcagcaaccatggaacaagattgttatgggtctttacctatgccaatgtcttacggactgaataacacacagggaactgtgattcctgcgaaagctaagagccataaagttgcaattgcatttggtgctacaactgcctgcatcagccttctgttccttgccgttggttcactattctggtggaggtgtaggcgaaaccggaagactcttttcaacgttgatgatcatcagcacatagagaacggcaacctcggaaatatgaagcggtttcaattcagagagctccaggctgcaacagaaaacttcagcagcaagaacatattaggaaaaggcgggtttggtattgtttaccgggggcagcttccagatggaagtcttgtagccgtcaagaggctcaaagatggtaatgctgcaggcggggaagcacagtttcagactgaagtcgagatgatcagcttagcagtgcacaggaacctcctcagactctatgggttctgcatgactgccagtgagaggctactggtctatccgtacatgtcgaatgggagtgtcgcgttgcgcctgaaagggaagccaccactggactggatcaccagaaagaggatagcacttggggcagcacgaggtctactttatctgcacgagcagtgtgatcccaagatcatccacagagacgttaaggcagcaaacatactgctagatgactgttgtgaagcaattgtcggggactttgggcttgcaaagctcctagaccaccgtgaatcgcatgtcaccacagctgtgcgcggaactgttggccacatcgctcccgagtacctctcgactggccagtcatctgagaaaacagatgtctttggttttggaattctgctgctggagctgatcacaggtcagactgcactggagtttgggaagtcatcaaatcagaagggagccatgttagactgggtgaagaagatgcaccaagagaagcagctggacatacttgtcgacaagggcctggggagcaaatatgaccgcattgagctggaggagatggtgcaagtagcactgctatgtactcagttcctccctggtcacaggcccaagatgtcagaggtggtccggatgctggaaggcgatggacttgcagagcggtgggaggcgttacaacacactgagtcacacaaattcaaggtgcccgagttctccttcagccgctgccactctgacctgacggacgactcgtcactgctggtgcaagcagtggagctttctgggccaagatgacaccaacggagacggtctgaggcaagaagtatccagcagttgtttcccagtagaaaatgtaaataatacaaagtgaagcaactggtgctgcatcctgtcagaagtcgaagcaaatctcaatcagctgaactgtacaaagattaaaaaaagagcacaacctagtctaagcatggtacattactacatctacagattatgtaactgttggtagaataaggatagagcaatgtttccattttgtttgttattttcccctttatattctattactgtagttatagtttgtaaaatgcaaaaacggcggcaatagcgctcgatgttggcgctgaagaactcaaatagctaaatagcttagc

SEQ ID NO: 302 - protein, 643 aa, Zea mays
MLLNLLPRRPHSCAALAMGEVVAASSLALVLLFFCSCGPASGLLSPKGVNYEVQALMMIKNYLKDPHGVLKNWDQDSVDPCSWTMVTCSPENLVTGLEAPSQNLSGILSPSIGNLTNLETVLLQNNNINGLIPAEIGKLRKLKTLDLSSNHFSGEIPSSVGHLESLQYLRLNNNTLSGAFPSSSTNLSHLIFLDLSYNNLSGPIPGSLTRTFNIVGNPLICAATMEQDCYGSLPMPMSYGLNNTQGTVIPAKAKSHKVAIAFGATTACISLLFLAVGSLFWWRCRRNRKTLFNVDDHQHIENGNLGNMKRFQFRELQAATENFSSKNILGKGGFGIVYRGQLPDGSLVAVKRLKDGNAAGGEAQFQTEVEMISLAVHRNLLRLYGFCMTASERLLVYPYMSNGSVALRLKGKPPLDWITRKRIALGAARGLLYLHEQCDPKIIHRDVKAANILLDDCCEAIVGDFGLAKLLDHRESHVTTAVRGTVGHIAPEYLSTGQSSEKTDVFGFGILLLELITGQTALEFGKSSNQKGAMLDWVKKMHQEKQLDILVDKGLGSKYDRIELEEMVQVALLCTQFLPGHRPKMSEVVRMLEGDGLAERWEALQHTESHKFKVPEFSFSRCHSDLTDDSSLLVQAVELSGPR

SEQ ID NO: 303 - DNA, 1818 bp, Zea mays
  CDS (1)..(1818)
atggagctgctcagcatcattctagttatagcatctctgctcccattcgcagcatctgatggtcaaggtgatgccttgtacgatatgaagctgaaactaaatgctactggcagtcagctttctgactggaaccaaaatcaagtcaacccatgcacctggaattctgttatttgtgacaacaacaaccatgttgtgcaagtaacattggcttctatggggtttactggagttctgtcaccaagaatcggagatctggagtatttaaatgttctgtccttgcctggtaacaacatctctggtggcataccagaagaatttggcaacctctctcgattgacaagcttagatttggaagacaacctgttggttgggccaataccagcttcacttggcaggctttcaaagctccagcttctgatactaagtcaaaacaatctcaatggctctattcctgatacactagcaagcattttaagcttgacagacattcggctggcttacaataaactcactggtcaaataccttcccagctgtttcaagttgcacgttataatttttcaggtaataacttgacctgtggagcaaacttcctccatccatgtgcctcaaatatgtcttaccaaggttcttcccgtggttcgacaataggcattgtgcttgggacagttggaggtcttatggggcttctaatcatatgggctgtattcattatctgcaatggaaggaggaaaagccatctacgtgaaatatttgtggatgtatcaggtgaggatgatcgtagaattgcatttggccagttgaaaagatttgcatggcgagaattgcaacttgcaactgataatttcagtgagaaaaatgttcttggacaagggggttttgggaaagtatataaaggagcacttccagatggcactaagattgctgtaaaacggttaactgattacgaaagtccaggtggagaggctgctttcttgcgtgaggttgagctaattagtgttgcagttcaccggaatcttttaagattgattggtttctgtacaacacaaacagagcgcctacttgtttatcctttcatgcaaaatcttagtgtggcctaccgactacgagaatttaaacctggggagccaatattagactggtctgcaaggaagcgagtggctataggcacagctcgtggactggagtatttgcacgagcactgcaatcctaagattatacatcgtgacgtcaaggctgccaatgtcttgcttgatgaaggttttgaaccggtggttggggatttcggcctggccaagctggtggacgtgcagaagacgtccgtgactacccaggtccgtggaaccatgggtcacatcgcccccgaatacctgtccactgggaagtcctccgagagaaccgatgtttttggctatggcataatgcttcttgagctagtcactggtcagcgtgccatcgacttttcacgtctggaggaagaagatgacgtgttgttacttgaccatgtcaagaagctgcagagggaagggcatctcgacgccatcgttgaccgcaacttgaacagctgttacaacgggcaggaggtggagatgatgatccagatcgcgctgctctgcacgcaggcgtcgcccgaggaccgcccgtccatgtccgaggtggtccggatgctggagggcgagggcctcgccgagaggtgggaggagtggcagcaggtggaggtgacgaggaggcaggactacgagcggatgcagcagcgcttcgactggggcgaggactccatctacaaccaggacgcgatcgaactgtccgccggcaggtga

SEQ ID NO: 304 - protein, 605 aa, Zea mays
MELLSIILVIASLLPFAASDGQGDALYDMKLKLNATGSQLSDWNQNQVNPCTWNSVICDNNNHVVQVTLASMGFTGVLSPRIGDLEYLNVLSLPGNNISGGIPEEFGNLSRLTSLDLEDNLLVGPIPASLGRLSKLQLLILSQNNLNGSIPDTLASILSLTDIRLAYNKLTGQIPSQLFQVARYNFSGNNLTCGANFLHPCASNMSYQGSSRGSTIGIVLGTVGGLMGLLIIWAVFIICNGRRKSHLREIFVDVSGEDDRRIAFGQLKRFAWRELQLATDNFSEKNVLGQGGFGKVYKGALPDGTKIAVKRLTDYESPGGEAAFLREVELISVAVHRNLLRLIGFCTTQTERLLVYPFMQNLSVAYRLREFKPGEPILDWSARKRVAIGTARGLEYLHEHCNPKIIHRDVKAANVLLDEGFEPVVGDFGLAKLVDVQKTSVTTQVRGTMGHIAPEYLSTGKSSERTDVFGYGIMLLELVTGQRAIDFSRLEEEDDVLLLDHVKKLQREGHLDAIVDRNLNSCYNGQEVEMMIQIALLCTQASPEDRPSMSEVVRMLEGEGLAERWEEWQQVEVTRRQDYERMQQRFDWGEDSIYNQDAIELSAGR

SEQ ID NO: 305 - DNA, 1881 bp, Zea mays
  CDS (1)..(1881)
atggcggcgtcggcgtcggctgggaggtggtgggcggtggtccttgcggtcgcggtgctgctcgggccgggacgggtcgtcgccaacaccgagggtgatgccctgtacagcctgcgtcagagcttgaaagatgctaacaatgtcttgcagagttgggatcccactcttgttaatccatgtacatggttccatgttacgtgtaacaacgataacagtgttatcagagttgaccttggaaatgcacaattatctggcgttctagtgccacaacttggccagctgaaaaatctccaatatttggagctttacagcaacaacataagtgggacaataccccctgaactggggaacctgactaacctggtcagtttggatctgtatatgaacaacttctctggcaatatccctgacagcctggggaatctagtgaagctgcgtttcctacgtcttaacaacaatagcttggttggcccgattcccgtatccttgaccaatatctccactctccaagtactggatctctcgaacaacaacctctcaggacaagtcccatcgactggctccttttcactcttcacccctataagttttgccaacaatccaaatctttgtggccctggtactacgaagccctgccctggggatcctcccttttccccacctcctccattcaatcctccatctcccccaactcaatcaactggtgcttctagcactggagcaatagctggaggtgttgctgctggtgcagcattggtgtttgctgttccagcaattgcatttgcaatgtggcgccgtcgtaaacctgaagagcatttcttcgatgttcctgccgaggaggatccagaagtccatcttggtcagctcaaaaagttttcattgcgggagcttcaagttgcaactgataatttcagtaacaagaacattttaggaagaggcggttttggaaaagtgtacaaaggaaggcttgctgatggctcattggtagcagtgaaaagactaaaagaggagcgtacacctggtggtgagcttcagttccaaacagaggttgagatgattagcatggcggtgcacaagaaccttctccgacttcgtggtttctgcatgacacctactgaaaggttgttagtctacccatacatggctaacgggagtgtggcatcacgtttacgagagcggcagccatctgagccacctcttagctgggaaccaagaagacggattgcactgggatctgcaagaggactttcttacttgcatgatcactgcgatcccaaaatcatccatcgggatgtcaaagctgcaaatattcttttggatgaggacttcgaggcagttgtgggtgatttcgggcttgccaagcttatggactacaaggatacccatgtcacaacagctgttcgtggaacaattgggcacattgctcccgagtacctatctaccggcaagtcttctgagaagactgatgtttttggctatgggatcatgcttctggagcttattactggccagagggcatttgatctagctcgtcttgcaaatgatgacgatgttatgcttcttgactgggtgaaaggactgttgaaggagaagaaggtggagatgctggtggacccagatctgcagaaagcctacgaggaggtcgaggtggagagccttattcaggtggcactcctctgcacgcagggctcccccctggaccgtccaaagatgtcggaggtggtgaggatgctcgaaggtgacgggctggcagagcgttgggacgaatggcagaaagtagaggtggtgaggcaggaggctgagtcggcaccgctccgcaatgactggatcgtcgattccacgtacaaccttcgtgccgtggagctgtccggcccaaggtag

SEQ ID NO: 306 - protein, 626 aa, Zea mays
MAASASAGRWWAVVLAVAVLLGPGRVVANTEGDALYSLRQSLKDANNVLQSWDPTLVNPCTWFHVTCNNDNSVIRVDLGNAQLSGVLVPQLGQLKNLQYLELYSNNISGTIPPELGNLTNLVSLDLYMNNFSGNIPDSLGNLVKLRFLRLNNNSLVGPIPVSLTNISTLQVLDLSNNNLSGQVPSTGSFSLFTPISFANNPNLCGPGTTKPCPGDPPFSPPPPFNPPSPPTQSTGASSTGAIAGGVAAGAALVFAVPAIAFAMWRRRKPEEHFFDVPAEEDPEVHLGQLKKFSLRELQVATDNFSNKNILGRGGFGKVYKGRLADGSLVAVKRLKEERTPGGELQFQTEVEMISMAVHKNLLRLRGFCMTPTERLLVYPYMANGSVASRLRERQPSEPPLSWEPRRRIALGSARGLSYLHDHCDPKIIHRDVKAANILLDEDFEAVVGDFGLAKLMDYKDTHVTTAVRGTIGHIAPEYLSTGKSSEKTDVFGYGIMLLELITGQRAFDLARLANDDDVMLLDWVKGLLKEKKVEMLVDPDLQKAYEEVEVESLIQVALLCTQGSPLDRPKMSEVVRMLEGDGLAERWDEWQKVEVVRQEAESAPLRNDWIVDSTYNLRAVELSGPR

SEQ ID NO: 307 - DNA, 1878 bp, Zea mays
  CDS (1)..(1878)
atgggggaggttgttgctgcttcctccctggccctggtgctgctcttcttctgctcttgcgggcctgcaagcggccttctctcccccaagggtgtaaactatgaagttcaagctctcatgatgatcaagaactacctcaaggatcctcatggtgtactgaagaactgggaccaagactctgtggatccttgcagctggacaatggtcacttgctctccagagaaccttgtcaccggcttagaagcaccaagccagaacctttctggaattctctccccaagtatagggaatctgaccaaccttgagacagttcttctgcagaacaacaacataaacgggttaatcccagcagagattggaaagctaagaaagctcaaaacgcttgatctgtccagcaaccacttctctggagaaatcccaagctctgtgggccaccttgaaagccttcagtatttgaggcttaacaacaacacattgtctggtgccttcccttcatcttcaactaatttgtcacaccttattttcctggatctgtcctacaataatttgagtggtccaatcccagggtccctgacaaggactttcaacattgtagggaatccactgatctgtgcagcaaccatggaacaagattgttatgggtctttacctatgccaatgtcttacggactgaataacacacagggaactgtgattcctgcgaaagctaagagccataaagttgcaattgcatttggtgctacaactgcctgcatcagccttctgttccttgccgttggttcattattctggtggaggtgtaggcgaaaccggaagactcttttcaacgttgatgatcagcacatagagaacggtaacctcggaaatatgaagcggtttcaattcagagagctccaggctgcaacagaaaacttcagcagcaagaacatattaggaaaaggcgggtttggtattgtttaccgggggcagcttccagatggaagtcttgtagccgtcaagaggctcaaagatggtaatgctgcaggcggggaagcacagtttcagactgaagtcgagatgatcagcctagcagtgcacaggaacctcctcagactctatgggttctgcatgactaccagtgagaggctactggtctatccatacatgtcgaatgggagtgtcgcgttgcgcctgaaagggaagccaccactggactggatcaccagaaagaggatagcacttggggcagcacgaggtctactttatctgcacgagcagtgtgatcccaagatcatccacagagacgttaaggcagcaaacatactgctagatgactgttgtgaagcaattgtcggggactttgggcttgcaaagctcctagaccaccgtgaatcgcatgtcaccacagctgtgcgcggaactgttggccacatcgctcccgagtacctctcgactggccagtcatctgagaaaacagatgtctttggttttggaatcctgctgctggagctgatcacaggtcagactgcactggagtttgggaagtcatcaaatcagaagggagccatgttagactgggtgaagaagatgcaccaagagaagcagctggacatacttgtcgacaagggcctggggagcaaatatgaccgcattgagctggaggagatggtgcaagtagcactgctatgtactcagttcctccctggtcacaggcccaagatgtcagaggtggtccggatgctggaaggcgatggacttgcagagcggtgggaggcgttacaacacactgagtcacacaaattcaaggtgcctgagttctccttcagccgctgccactctgacctgacggacgactcgtcactgttggtgcaagcagtggagctttctgggccaagatga

SEQ ID NO: 308 - protein, 625 aa, Zea mays
MGEVVAASSLALVLLFFCSCGPASGLLSPKGVNYEVQALMMIKNYLKDPHGVLKNWDQDSVDPCSWTMVTCSPENLVTGLEAPSQNLSGILSPSIGNLTNLETVLLQNNNINGLIPAEIGKLRKLKTLDLSSNHFSGEIPSSVGHLESLQYLRLNNNTLSGAFPSSSTNLSHLIFLDLSYNNLSGPIPGSLTRTFNIVGNPLICAATMEQDCYGSLPMPMSYGLNNTQGTVIPAKAKSHKVAIAFGATTACISLLFLAVGSLFWWRCRRNRKTLFNVDDQHIENGNLGNMKRFQFRELQAATENFSSKNILGKGGFGIVYRGQLPDGSLVAVKRLKDGNAAGGEAQFQTEVEMISLAVHRNLLRLYGFCMTTSERLLVYPYMSNGSVALRLKGKPPLDWITRKRIALGAARGLLYLHEQCDPKIIHRDVKAANILLDDCCEAIVGDFGLAKLLDHRESHVTTAVRGTVGHIAPEYLSTGQSSEKTDVFGFGILLLELITGQTALEFGKSSNQKGAMLDWVKKMHQEKQLDILVDKGLGSKYDRIELEEMVQVALLCTQFLPGHRPKMSEVVRMLEGDGLAERWEALQHTESHKFKVPEFSFSRCHSDLTDDSSLLVQAVELSGPR

SEQ ID NO: 309 - DNA, 1857 bp, Zea mays
  CDS (1)..(1857)
atgatggattcagtaagcatgaagctgttagcttttgtgttccttctgttgcgatgccagcgggcatcgcttgctcttgctgtcgacttccaagtcgaagcattggttgaaatgaggacgcaacttggtgacaaacgtggtgtccttagtgattggaaggataatcaaatgagcccctgctactgggccaatgttaattgccaagataacaaagtcacaacaataattttgagctcgtcagggttaacaggatccttatcacccagcattgcaaagctaacaactttacagcagctgatactggataacaacaacattactggagggattcctccggagtttggaaacctatcaggtttgacaattctaaaccttggaagaaataatttaaatgggtcaataccggactcccttggacaactttctaaactccaaaatctggatctaagccataattatttgaccggaaatatcccaagctctttctcaaatcttctgtcattgagtgatattaatctggcatataataatataagaggtgcaatcccacaacatctacttcaggtggcccaatacaactatgcaggcaaccacttgaattgtggccaaaatttatctgcatgtgaacgaggcagcacattgacaggtggatccaaaaatttcaagctaaacgtggttattggaagcattgctggagcagtcacattttctgtaactgtagttctagttttgctatggtggcaaagaatgcgttaccggcctgaaatcttcattgacgtgtcaggtcagaatgatcatatgcttgagtttgggcaaataaagcggttctcatggcgggagcttcagattgcaaccagcaatttcagtgaacagaatgttcttggcaagggtggttttggtaaggtgtataaaggagttcttccaggtccaaacagtataaagattgcagtgaaacgactactgaacgtggacagtcgtgatggggaaatggctttcctcagagaagttgaattgataagcattgctgtacacaagaacatattaaggttgataggattctgtacaacaccaacagagaggcttttggtctaccctttcatggagaatcttagtgttgcttcccgtttaagagatataaaactaaacgaaccagcattagattggtctacaagaatgcgaattgctcttggcgctgcctgtggtttggagtaccttcatgagcactgcaatcccaagatcatccaccgtgatgtcaaggctgcaaatgtcctgcttgatgggaactttgaagcagtggtaggagattttgggctggcgaagatggtagacatagggaggaatacagtaacaacaggggttcgtggaactatgggccacgtagctcctgagtacataaagacaggaaggccatcagtgaagacagatatctttggttatggtgtcatgctgttagagattgtgacaggagagcgtgcaattgcattccatcctgaccgtatagaagaagcaggcgagatcctgctcactgatcaggtcaagctatggatggaagaagggcgactactcgacctagtggatcgcaatctaggtggcgtctacaaccttgaagagctggagaaggttacccagatagcacttctctgcactcacatggatcctgaacaacgccctacaatgtctgaggtggtgcagatgctggaaggagagattgtcccagcagagcggtgggaggagtggcagctggctgagctccaacgacgacaacagcatgagatgaggcaacagggcaaactattcaacttcagtgaagagtctcaaaacatccaggaagccattgagttgtcagctggcagatga

SEQ ID NO: 310 - protein, 618 aa, Zea mays
MMDSVSMKLLAFVFLLLRCQRASLALAVDFQVEALVEMRTQLGDKRGVLSDWKDNQMSPCYWANVNCQDNKVTTIILSSSGLTGSLSPSIAKLTTLQQLILDNNNITGGIPPEFGNLSGLTILNLGRNNLNGSIPDSLGQLSKLQNLDLSHNYLTGNIPSSFSNLLSLSDINLAYNNIRGAIPQHLLQVAQYNYAGNHLNCGQNLSACERGSTLTGGSKNFKLNVVIGSIAGAVTFSVTVVLVLLWWQRMRYRPEIFIDVSGQNDHMLEFGQIKRFSWRELQIATSNFSEQNVLGKGGFGKVYKGVLPGPNSIKIAVKRLLNVDSRDGEMAFLREVELISIAVHKNILRLIGFCTTPTERLLVYPFMENLSVASRLRDIKLNEPALDWSTRMRIALGAACGLEYLHEHCNPKIIHRDVKAANVLLDGNFEAVVGDFGLAKMVDIGRNTVTTGVRGTMGHVAPEYIKTGRPSVKTDIFGYGVMLLEIVTGERAIAFHPDRIEEAGEILLTDQVKLWMEEGRLLDLVDRNLGGVYNLEELEKVTQIALLCTHMDPEQRPTMSEVVQMLEGEIVPAERWEEWQLAELQRRQQHEMRQQGKLFNFSEESQNIQEAIELSAGR

SEQ ID NO: 311 - DNA, 2515 bp, Zea mays
  CDS (82)..(2118)
cgtgtccgcaccgtgcccaacctccacaccgctcgccggcccaacgagaacacaaacgtgttaggcgcagcagtgattcgcatgcagcggaactgcgaaaagattgcactgacgagagaaaagtcgccaggtgcgtcatttgcttgctacactgacaggttctcagagcagaagcatccggcacccctgctcctgaacttgttgccgaggaggccacactcttgcgctgccttggcaatgggggaggttgttgctgcttcctccctggccctggtgctgctcttcttctgctcttgcgggcctgcaagcggccttctctcccccaagggtgtaaactatgaagttcaagctctcatgatgatcaagaactacctcaaggatcctcatggtgtactgaagaactgggaccaagactctgtggatccttgcagctggacaatggtcacttgctctccagagaaccttgtcaccggcttagaagcaccaagccagaacctttctggaattctctccccaagtatagggaatctgaccaaccttgagacagttcttctgcagaacaacaacataaacgggttaatcccagcagagattggaaagctaagaaagctcaaaacgcttgatctgtccagcaaccacttctctggagaaatcccaagctctgtgggccaccttgaaagccttcagtatttgaggcttaacaacaacacattgtctggtgccttcccttcatcatcaactaatttgtcacaccttattttcctggatctgtcatacaataatttgagtggtccaatcccagggtccctgacaaggactttcaacattgtagggaatccactgatctgtgcagcaaccatggaacaagattgttatgggtctttacctatgccaatgtcttacggactgaataacacacagggaactgtgattcctgcaaaagctaagagccataaagttgcaattgcatttggtgctacaactgcctgcatcagccttctgttccttgccgttggttcactattctggtggaggtgtaggcgaaaccggaagactcttttcaacgttgatgatcatcagcacatagagaacggcaacctcggaaatatgaagcggtttcaattcagagagctccaggctgcaacagaaaacttcagcagcaagaacatattaggaaaaggcgggtttggtattgtttaccgggggcagcttccagatggaagtcttgtagccgtcaagaggctcaaagatggtaatgctgcaggcggggaagcacagtttcagactgaagtcgagatgatcagcttagcagtgcacaggaacctcctcagactctatgggttctgcatgactgccagtgagaggctactggtctatccgtacatgtcgaatgggagtgtcgcgttgcgcctgaaagggaagccaccactggactggatcaccagaaagaggatagcacttggggcagcacgaggtctactttatctgcacgagcagtgtgatcccaagatcatccacagagacgttaaggcagcaaacatactgctagatgactgttgtgaagcaattgtcggggactttgggcttgcaaagctcctagaccaccgtgaatcgcatgtcaccacagctgtgcgcggaactgttggccacatcgctcccgagtacctctcgactggccagtcatctgagaaaacagatgtctttggttttggaatcctgctgctggagctgatcaccggtcagactgcactggagtttgggaagtcatcaaatcagaagggagccatgttagactgggtgaagaagatgcaccaagagaagcagctggacatacttgtcgacaagggcctggggagcaaatatgaccgcattgagctggaggagatggtgcaagtagcactgctatgtactcagttcctccctggtcacaggcccaagatgtcagaggtggtccggatgctggaaggcgatggacttgcagagcggtgggaggcgttacaacacactgagtcacacaaattcaaggtgcctgagttctccttcagccgctgccactctgacctgacggacgactcgtcactgttggtgcaagcagtggagctttctgggccaagatgacaccaacggagacggtctgtggcaagaagtatccagcagttgtttcccagtagaaaatgtaaataatacaaagtgaagcaactggtgctgcatcctgtcagaagtcgaagcaaatctcaatcagctgaactgtacaaagattaaaaaaagagcacaacctagtctaagcatggtacattactacatctacagattatgtaactgttggtagaataaggatagagcaatgtttccattttgtttgttattttcccctttgtattctattactgtagttatagtttgtaaaatgcaaaaacggtggcaatagcgctcgatgttggtgctgaagaactcaaatagcttagtaaagaccaagtgtagacaggtgccaacgaagaatttgattgtgtgcatg

SEQ ID NO: 312 - protein, 678 aa, Zea mays
MQRNCEKIALTREKSPGASFACYTDRFSEQKHPAPLLLNLLPRRPHSCAALAMGEVVAASSLALVLLFFCSCGPASGLLSPKGVNYEVQALMMIKNYLKDPHGVLKNWDQDSVDPCSWTMVTCSPENLVTGLEAPSQNLSGILSPSIGNLTNLETVLLQNNNINGLIPAEIGKLRKLKTLDLSSNHFSGEIPSSVGHLESLQYLRLNNNTLSGAFPSSSTNLSHLIFLDLSYNNLSGPIPGSLTRTFNIVGNPLICAATMEQDCYGSLPMPMSYGLNNTQGTVIPAKAKSHKVAIAFGATTACISLLFLAVGSLFWWRCRRNRKTLFNVDDHQHIENGNLGNMKRFQFRELQAATENFSSKNILGKGGFGIVYRGQLPDGSLVAVKRLKDGNAAGGEAQFQTEVEMISLAVHRNLLRLYGFCMTASERLLVYPYMSNGSVALRLKGKPPLDWITRKRIALGAARGLLYLHEQCDPKIIHRDVKAANILLDDCCEAIVGDFGLAKLLDHRESHVTTAVRGTVGHIAPEYLSTGQSSEKTDVFGFGILLLELITGQTALEFGKSSNQKGAMLDWVKKMHQEKQLDILVDKGLGSKYDRIELEEMVQVALLCTQFLPGHRPKMSEVVRMLEGDGLAERWEALQHTESHKFKVPEFSFSRCHSDLTDDSSLLVQAVELSGPR

SEQ ID NO: 313 - DNA, 29 bp, Artificial sequence
  primer
atagagctctgtgtcaccagatgctcaag

SEQ ID NO: 314 - DNA, 29 bp, Artificial sequence
  primer
atacccgggaagctggtcaagctagacag

SEQ ID NO: 315 - DNA, 22 bp, Artificial sequence
  primer
atggctctgcttattatcactg

SEQ ID NO: 316 - DNA, 21 bp, Artificial sequence
  primer
ctatcttccaccagataattc

SEQ ID NO: 317 - DNA, 29 bp, Artificial sequence
  primer
ataccatggtgtgtcaccagatgctcaag

SEQ ID NO: 318 - DNA, 31 bp, Artificial sequence
  primer
atattaattaaaagctggtcaagctagacag

SEQ ID NO: 319 - DNA, 29 bp, Artificial sequence
  primer
ataggtacctgtgtcaccagatgctcaag

SEQ ID NO: 320 - DNA, 29 bp, Artificial sequence
  primer
atagtcgacaagctggtcaagctagacag

SEQ ID NO: 321 - protein, 681 aa, Artificial sequence
  consensus sequence
  Variant (3)..(7): Xaa in position 3 to 7 is any amino acid
  Variant (8)..(8): Xaa in position 8 is any or no amino acid
  Variant (10)..(10): Xaa in position 10 is any amino acid
  Variant (11)..(21): Xaa in position 11 to 21 is any or no amino acid
  Variant (23)..(26): Xaa in position 23 to 26 is any amino acid
  Variant (28)..(28): Xaa in position 28 is any amino acid
  Variant (31)..(31): Xaa in position 31 is any amino acid
  Variant (32)..(32): Xaa in position 32 is any or no amino acid
  Variant (34)..(35): Xaa in position 34 to 35 is any amino acid
  Variant (37)..(37): Xaa in position 37 is any amino acid
  Variant (39)..(41): Xaa in position 39 to 41 is any amino acid
  Variant (42)..(43): Xaa in position 42 to 43 is any or no amino acid
  Variant (45)..(45): Xaa in position 45 is any amino acid
  Variant (46)..(57): Xaa in position 46 to 57 is any or no amino acid
  Variant (59)..(59): Xaa in position 59 is any amino acid
  Variant (61)..(66): Xaa in position 61 to 66 is any amino acid
  Variant (68)..(69): Xaa in position 68 to 69 is any amino acid
  Variant (71)..(72): Xaa in position 71 to 72 is any amino acid
  Variant (73)..(74): Xaa in position 73 to 74 is any or no amino acid
  Variant (76)..(77): Xaa in position 76 to 77 is any amino acid
  Variant (79)..(79): Xaa in position 79 is any amino acid
  Variant (81)..(81): Xaa in position 81 is any amino acid
  Variant (83)..(83): Xaa in position 83 is any amino acid
  Variant (86)..(88): Xaa in position 86 to 88 is any amino acid
  Variant (90)..(90): Xaa in position 90 is any amino acid
  Variant (91)..(91): Xaa in position 91 is any or no amino acid
  Variant (93)..(94): Xaa in position 93 to 94 is any amino acid
  Variant (96)..(97): Xaa in position 96 to 97 is any amino acid
  Variant (101)..(102): Xaa in position 101 to 102 is any amino acid
  Variant (104)..(106): Xaa in position 104 to 106 is any amino acid
  Variant (108)..(108): Xaa in position 108 is any amino acid
  Variant (111)..(113): Xaa in position 111 to 113 is any amino acid
  Variant (115)..(115): Xaa in position 115 is any amino acid
  Variant (117)..(118): Xaa in position 117 to 118 is any amino acid
  Variant (120)..(121): Xaa in position 120 to 121 is any amino acid
  Variant (123)..(123): Xaa in position 123 is any amino acid
  Variant (124)..(124): Xaa in position 124 is any or no amino acid
  Variant (126)..(126): Xaa in position 126 is any amino acid
  Variant (127)..(127): Xaa in position 127 is any or no amino acid
  Variant (129)..(129): Xaa in position 129 is any amino acid
  Variant (131)..(131): Xaa in position 131 is any amino acid
  Variant (133)..(134): Xaa in position 133 to 134 is any amino acid
  Variant (136)..(138): Xaa in position 136 to 138 is any amino acid
  Variant (139)..(143): Xaa in position 139 to 143 is any or no amino acid
  Variant (145)..(145): Xaa in position 145 is any amino acid
  Variant (146)..(151): Xaa in position 146 to 151 is any or no amino acid
  Variant (153)..(153): Xaa in position 153 is any amino acid
  Variant (155)..(155): Xaa in position 155 is any amino acid
  Variant (157)..(158): Xaa in position 157 to 158 is any amino acid
  Variant (160)..(162): Xaa in position 160 to 162 is any amino acid
  Variant (163)..(175): Xaa in position 163 to 175 is any or no amino acid
  Variant (177)..(179): Xaa in position 177 to 179 is any amino acid
  Variant (181)..(200): Xaa in position 181 to 200 is any amino acid
  Variant (201)..(268): Xaa in position 201 to 268 is any or no amino acid
  Variant (270)..(270): Xaa in position 270 is any amino acid
  Variant (272)..(273): Xaa in position 272 to 273 is any amino acid
  Variant (275)..(277): Xaa in position 275 to 277 is any amino acid
  Variant (280)..(281): Xaa in position 280 to 281 is any amino acid
  Variant (284)..(285): Xaa in position 284 to 285 is any amino acid
  Variant (287)..(289): Xaa in position 287 to 289 is any amino acid
  Variant (291)..(291): Xaa in position 291 is any amino acid
  Variant (292)..(321): Xaa in position 292 to 321 is any or no amino acid
  Variant (324)..(324): Xaa in position 324 is any amino acid
  Variant (329)..(329): Xaa in position 329 is any amino acid
  Variant (334)..(334): Xaa in position 334 is any amino acid
  Variant (336)..(336): Xaa in position 336 is any amino acid
  Variant (337)..(338): Xaa in position 337 to 338 is any or no amino acid
  Variant (340)..(343): Xaa in position 340 to 343 is any amino acid
  Variant (349)..(353): Xaa in position 349 to 353 is any amino acid
  Variant (354)..(354): Xaa in position 354 is any or no amino acid
  Variant (358)..(359): Xaa in position 358 to 359 is any amino acid
  Variant (361)..(362): Xaa in position 361 to 362 is any amino acid
  Variant (366)..(366): Xaa in position 366 is any amino acid
  Variant (369)..(369): Xaa in position 369 is any amino acid
  Variant (379)..(379): Xaa in position 379 is any amino acid
  Variant (383)..(383): Xaa in position 383 is any amino acid
  Variant (385)..(386): Xaa in position 385 to 386 is any amino acid
  Variant (394)..(394): Xaa in position 394 is any amino acid
  Variant (396)..(396): Xaa in position 396 is any amino acid
  Variant (398)..(398): Xaa in position 398 is any amino acid
  Variant (402)..(403): Xaa in position 402 to 403 is any amino acid
  Variant (405)..(407): Xaa in position 405 to 407 is any amino acid
  Variant (408)..(412): Xaa in position 408 to 412 is any or no amino acid
  Variant (414)..(414): Xaa in position 414 is any amino acid
  Variant (416)..(416): Xaa in position 416 is any amino acid
  Variant (418)..(419): Xaa in position 418 to 419 is any amino acid
  Variant (421)..(422): Xaa in position 421 to 422 is any amino acid
  Variant (425)..(425): Xaa in position 425 is any amino acid
  Variant (427)..(427): Xaa in position 427 is any amino acid
  Variant (432)..(432): Xaa in position 432 is any amino acid
  Variant (436)..(437): Xaa in position 436 to 437 is any amino acid
  Variant (439)..(439): Xaa in position 439 is any amino acid
  Variant (452)..(452): Xaa in position 452 is any amino acid
  Variant (456)..(457): Xaa in position 456 to 457 is any amino acid
  Variant (471)..(471): Xaa in position 471 is any amino acid
  Variant (473)..(473): Xaa in position 473 is any amino acid
  Variant (474)..(476): Xaa in position 474 to 476 is any or no amino acid
  Variant (481)..(481): Xaa in position 481 is any amino acid
  Variant (484)..(486): Xaa in position 484 to 486 is any amino acid
  Variant (489)..(489): Xaa in position 489 is any amino acid
  Variant (501)..(501): Xaa in position 501 is any amino acid
  Variant (511)..(511): Xaa in position 511 is any amino acid
  Variant (514)..(514): Xaa in position 514 is any amino acid
  Variant (519)..(519): Xaa in position 519 is any amino acid
  Variant (522)..(523): Xaa in position 522 to 523 is any amino acid
  Variant (525)..(536): Xaa in position 525 to 536 is any amino acid
  Variant (537)..(540): Xaa in position 537 to 540 is any or no amino acid
  Variant (543)..(543): Xaa in position 543 is any amino acid
  Variant (546)..(549): Xaa in position 546 to 549 is any amino acid
  Variant (551)..(556): Xaa in position 551 to 556 is any amino acid
  Variant (559)..(560): Xaa in position 559 to 560 is any amino acid
  Variant (562)..(567): Xaa in position 562 to 567 is any amino acid
  Variant (568)..(574): Xaa in position 568 to 574 is any or no amino acid
  Variant (576)..(576): Xaa in position 576 is any amino acid
  Variant (578)..(580): Xaa in position 578 to 580 is any amino acid
  Variant (582)..(582): Xaa in position 582 is any amino acid
  Variant (589)..(590): Xaa in position 589 to 590 is any amino acid
  Variant (592)..(593): Xaa in position 592 to 593 is any amino acid
  Variant (596)..(596): Xaa in position 596 is any amino acid
  Variant (601)..(602): Xaa in position 601 to 602 is any amino acid
  Variant (607)..(607): Xaa in position 607 is any amino acid
  Variant (609)..(609): Xaa in position 609 is any amino acid
  Variant (610)..(610): Xaa in position 610 is any or no amino acid
  Variant (612)..(612): Xaa in position 612 is any amino acid
  Variant (613)..(613): Xaa in position 613 is any or no amino acid
  Variant (615)..(619): Xaa in position 615 to 619 is any amino acid
  Variant (620)..(673): Xaa in position 620 to 673 is any or no amino acid
  Variant (675)..(675): Xaa in position 675 is any amino acid
  Variant (680)..(680): Xaa in position 680 is any amino acid
ALXXXXXXLXXXXXXXXXXXXWXXXXVXPCXXWXXVXCXXXXXVXXXXXXXXXXXXXGXLXXXXXXLXXLXXXXLXXNXIXGXIPXXXGXXLXXLXXLDLXXNXXXGXIPXXXGXLXXLXXLXXLXXNXLXGXXPXXXXXXXXLXXXXXXXNXLXGXXPXXXXXXXXXXXXXXXXNXXXCXXXXXXXXXXXXXXXXXXXXXXXXXXXXXXXXXXXXXXXXXXXXXXXXXXXXXXXXXXXXXXXXXXXXXXXXXXXXXXXXXXXXXXXXGXLXXFXXXELXXATXXFXXXNXXXXXXXXXXXXXXXXXXXXXXXXXXXXXXXLGXGGFGXVYKGXLXXXDXXXXAVKRLXXXXXXGGEXXFXXEVEXISXAVHRNLLRLXGFCXTXXERLLVYPXMXNXSVAXXLXXXXXXXXPXLXWXXRXXIAXGXARGLXYLHXXCXPKIIHRDVKAANXLLDXXFEAVVGDFGLAKLXDXXXXHVTTXVRXXXGTXGHIAPEYLSTGXSSEKTDVFGXGIXLLELXTGXXAXXXXXXXXXXXXXXXXLDXVKXXXXEXXXXXXVDXXLXXXXXXXXXXXXXEXEXXXQXALLCTQXXPXXRPXMSEVXXMLEGXGXXAXXWXXXXXXXXXXXXXXXXXXXXXXXXXXXXXXXXXXXXXXXXXXXXXXXXXXXXXXXXXXXAXELSGXR

SEQ ID NO: 322 - protein, 31 aa, Artificial sequence
  protein pattern
  Variant (2)..(3): Xaa in position 2 to 3 is any amino acid
  Variant (12)..(12): Xaa in position 12 is Ile or Val
  Variant (16)..(16): Xaa in position 16 is Asp, Glu or Gly
  Variant (17)..(18): Xaa in position 17 to 18 is any amino acid
  Variant (20)..(20): Xaa in position 20 is Ala or Pro
  Variant (21)..(21): Xaa in position 21 is Ile or Val
  Variant (29)..(29): Xaa in position 29 is Lys or Arg
  Variant (30)..(30): Xaa in position 30 is Leu or Met
  Variant (31)..(31): Xaa in position 31 is Leu, Met or Val
KXXHRDVKAANXLLDXXXEXXVGDFGLAXXX

SEQ ID NO: 323 - protein, 26 aa, Artificial sequence
  protein pattern
  Variant (3)..(3): Xaa in position 3 is any amino acid
  Variant (6)..(8): Xaa in position 6 to 8 is any amino acid
  Variant (9)..(9): Xaa in position 9 is Ala or Pro
  Variant (10)..(11): Xaa in position 10 to 11 is any amino acid
  Variant (14)..(14): Xaa in position 14 is any amino acid
  Variant (19)..(19): Xaa in position 19 is Ile, Leu, Met or Val
  Variant (20)..(20): Xaa in position 20 is any amino acid
  Variant (21)..(21): Xaa in position 21 is Met or Val
  Variant (23)..(23): Xaa in position 23 is Glu or Gln
  Variant (25)..(25): Xaa in position 25 is any amino acid
  Variant (26)..(26): Xaa in position 26 is Gly, Ile or Val
ALXCTXXXXXXRPXMSEVXXXLXGXX

SEQ ID NO: 324 - protein, 21 aa, Artificial sequence
  protein pattern
  Variant (2)..(2): Xaa in position 2 is any amino acid
  Variant (4)..(5): Xaa in position 4 to 5 is any amino acid
  Variant (7)..(8): Xaa in position 7 to 8 is any amino acid
  Variant (9)..(9): Xaa in position 9 is Ile or Val
  Variant (11)..(11): Xaa in position 11 is Ile, Leu or Val
  Variant (13)..(13): Xaa in position 13 is Ala, Ser or Thr
  Variant (16)..(16): Xaa in position 16 is Ala or Gly
  Variant (17)..(18): Xaa in position 17 to 18 is any amino acid
  Variant (19)..(19): Xaa in position 19 is Trp or Tyr
LXWXXRXXXAXGXARXXXXLH

SEQ ID NO: 325 - protein, 20 aa, Artificial sequence
  protein pattern
  Variant (2)..(3): Xaa in position 2 to 3 is any amino acid
  Variant (5)..(5): Xaa in position 5 is Asn or Ser
  Variant (6)..(7): Xaa in position 6 to 7 is any amino acid
  Variant (9)..(10): Xaa in position 9 to 10 is Ile, Leu or Val
  Variant (12)..(12): Xaa in position 12 is any amino acid
  Variant (15)..(15): Xaa in position 15 is Phe or Tyr
  Variant (17)..(17): Xaa in position 17 is any amino acid
  Variant (20)..(20): Xaa in position 20 is Lys or Arg
TXXFXXXNXXGXGGXGXVYX

SEQ ID NO: 326 - protein, 14 aa, Artificial sequence
  protein pattern
  Variant (2)..(2): Xaa in position 2 is any amino acid
  Variant (3)..(3): Xaa in position 3 is Asp or Asn
  Variant (4)..(4): Xaa in position 4 is Asp, Gly, Asn or Ser
  Variant (5)..(5): Xaa in position 5 is Ala, Asn, Ser or Thr
  Variant (6)..(6): Xaa in position 6 is any amino acid
  Variant (7)..(7): Xaa in position 7 is Ile or Val
  Variant (13)..(13): Xaa in position 13 is any amino acid
  Variant (14)..(14): Xaa in position 14 is Asp or Glu
LXXXXXXAVKRLXX

SEQ ID NO: 327 - protein, 16 aa, Artificial sequence
  protein pattern
  Variant (2)..(2): Xaa in position 2 is any amino acid
  Variant (4)..(4): Xaa in position 4 is Ser or Val
  Variant (5)..(5): Xaa in position 5 is Glu, Pro, Ser or Thr
  Variant (6)..(6): Xaa in position 6 is any amino acid
  Variant (7)..(7): Xaa in position 7 is Ile, Leu or Val
  Variant (8)..(9): Xaa in position 8 to 9 is any amino acid
  Variant (11)..(12): Xaa in position 11 to 12 is any amino acid
  Variant (14)..(15): Xaa in position 14 to 15 is any amino acid
  Variant (16)..(16): Xaa in position 16 is Ile, Leu, Met or Val
GXLXXXXXXLXXLXXX

SEQ ID NO: 328 - protein, 13 aa, Artificial sequence
  protein pattern
  Variant (2)..(2): Xaa in position 2 is Asp, Asn or Ser
  Variant (3)..(3): Xaa in position 3 is any amino acid
  Variant (5)..(5): Xaa in position 5 is Gly, Asn or Ser
  Variant (7)..(7): Xaa in position 7 is any amino acid
  Variant (9)..(10): Xaa in position 9 to 10 is any or no amino acid
  Variant (12)..(12): Xaa in position 12 is any amino acid
  Variant (13)..(13): Xaa in position 13 is Asn, Pro, Gln, Ser or Thr
LXXNXLXGXXPXX

SEQ ID NO: 329 - DNA, 1515 bp, Arabidopsis thaliana; identical to SEQ ID NO: 60
  CDS (1)..(1515)

SEQ ID NO: 330 - protein, 504 aa, Arabidopsis thaliana; identical to SEQ ID NO: 61

SEQ ID NO: 331 - DNA, 1395 bp, Zea mays
  CDS (1)..(1395)
atggctacctcctccaccaccgcgctccactcgcagttccggccaccgctgcgcgctccccgccatctccgtccgcttccacactcgtattcctcctcctcccgcactcgcggctgcgctcctgtccgggcctcagcggcgtccgcatccgcgccggcccagcgggagatcgccgcgggcgtcccgtggggctgcgagatcgagtccctggagagcgcggcatcgttggagcggtggctcatagactcgggcctaccggagcaacgcttggccatccaacgcgtggacatcggcgagcgcggcctcgtcgccctcaagaacatacgcaagggggagaagctgctcttcgtgcccccttccctcgtcatcaccgccgattcagagtggggtcgccctgaggtgggagatgtgatgaaaaggaactccgtgccggactggccgcttatcgctacttacctcataagtgaagccagtttagagggctcgtcgaggtggatcagctacatagcagcgttgccgaggcagccttactcgcttttatactggactcgtgcagagctagatgcatacttagtggcctcaccaatcaggaaacgtgcaattcagaggataactgatgtgattgggacatacaacgaccttcgagaccgtatattttccaggcatccagatttgttccctgaagaggtgtataacatagagacatttctatggtcctttgggattctgttctcacgcctggttcgcttgccatcaatggatggaagggttgcactagttccttgggcagatatgcttaatcatagccccgaggtggaaacattcttggatttcgataagtcatcgcgaggaatagttttcaccactgaccgctcatatcaaccaggtgagcaggtatttatatcttatgggaagaaatccagtggtgagctattgctttcatatggttttgttccaaaagagggaacaaatccaaatgattcagttgaactgttggtgtctcttgataagtctgataattgctataaagagaaattacaagcactgaagcgaaatggtttgtcagaatctgaaagtttccctttgcgggtcacaggatggccagttgagctgatggcttatgccttccttgtggtcagtccacctgacatgagtcaatgctttgaggagatggctgctgctgcatctaataaaacttcatccaaacctggattgaattatcctgacctggaagaacaggcccttcagtttatcttggactgctgtgaatctaatatagaaaaatatacaaagtgctttgaccttgccgccaaagcctcagatacttgtatgccaaatcagactgcagtccaggctctcggccgcaaatttcatctagatgctagaaacaagtaa

SEQ ID NO: 332 - protein, 464 aa, Zea mays
MATSSTTALHSQFRPPLRAPRHLRPLPHSYSSSSRTRGCAPVRASAASASAPAQREIAAGVPWGCEIESLESAASLERWLIDSGLPEQRLAIQRVDIGERGLVALKNIRKGEKLLFVPPSLVITADSEWGRPEVGDVMKRNSVPDWPLIATYLISEASLEGSSRWISYIAALPRQPYSLLYWTRAELDAYLVASPIRKRAIQRITDVIGTYNDLRDRIFSRHPDLFPEEVYNIETFLWSFGILFSRLVRLPSMDGRVALVPWADMLNHSPEVETFLDFDKSSRGIVFTTDRSYQPGEQVFISYGKKSSGELLLSYGFVPKEGTNPNDSVELLVSLDKSDNCYKEKLQALKRNGLSESESFPLRVTGWPVELMAYAFLVVSPPDMSQCFEEMAAAASNKTSSKPGLNYPDLEEQALQFILDCCESNIEKYTKCFDLAAKASDTCMPNQTAVQALGRKFHLDARNK

SEQ ID NO: 333 - DNA, 1191 bp, Arabidopsis thaliana; identical to SEQ ID NO: 94
  CDS (1)..(1191)

SEQ ID NO: 334 - protein, 396 aa, Arabidopsis thaliana; identical to SEQ ID NO: 95

SEQ ID NO: 335 - DNA, 1209 bp, Glycine max
  CDS (1)..(1209)
atgattaatgggttttgttccccttttgtgaatttgggttgtgaatactcaatgggttccatcagagggatcaagaagaggaagaaagctgacaacaaagatggcccagatgcctctgcaacctcattcgattggtggcatcacttctccctcagaatctcaggacctttagctcgatctaaaaatatagagaaatttgagtctgttttcaagatctcaaggaagacgttcaactatatatgttctcttgtggaagaagacatgctggccagagcctcaaattttgttgatctaaatggcaatcgtttgtctttgaatgatcaagtagctgtagctctcagaaggcttagctctggtgagtcattgtcaaccattggtgaatcatttcggatgaatcagtcaactgtttcccaggtaacatggaaatttgtggaaacaatggaagaaagagggctccaccatcttagttgggcttcaactgaaatggaaatggaggagataaagtccaagtttgagaacatacggggcctttctaattgttgtggtgccgttgacagcacacacataatgatgactttgccctctgtggatgctttgaatagtgtgtggcttgaccgtgagaagaattgtagcatggtcttgcaagccattgtggatccggatttgagattccgcgacatagttactggatggccaggaagtatgagtgatgagcaagtgcttcgaagctcttcttttttcaaactggctgaagaagggaagaggttgaatgggggtaagaaaacacttccagatggaacactgtttagggaatatattataggggatacaggctttccccttttttcatggcttcttacaccttatgaaggtaaaggattctcaaatgttcaagttgagtttaataaaagggttgttgaaacccaaatggtggccaagaaagcattggctaggctgaaggatatgtggaagataatccaaggtgtgatgtggaagcctgataagcacaagttaccaagaattattcttgtttgctgtatactacataatatagttatcgatatggaggatgaagtactgattgatatgccctcttgccaccagcatgattcgagatatcaagaccaaactagtgaatttgctgacaatactgccaccattatgagagagaagctatctctctacttatctggcaaactgccaacttga

SEQ ID NO: 336 - protein, 402 aa, Glycine max
MINGFCSPFVNLGCEYSMGSIRGIKKRKKADNKDGPDASATSFDWWHHFSLRISGPLARSKNIEKFESVFKISRKTFNYICSLVEEDMLARASNFVDLNGNRLSLNDQVAVALRRLSSGESLSTIGESFRMNQSTVSQVTWKFVETMEERGLHHLSWASTEMEMEEIKSKFENIRGLSNCCGAVDSTHIMMTLPSVDALNSVWLDREKNCSMVLQAIVDPDLRFRDIVTGWPGSMSDEQVLRSSSFFKLAEEGKRLNGGKKTLPDGTLFREYIIGDTGFPLFSWLLTPYEGKGFSNVQVEFNKRVVETQMVAKKALARLKDMWKIIQGVMWKPDKHKLPRIILVCCILHNIVIDMEDEVLIDMPSCHQHDSRYQDQTSEFADNTATIMREKLSLYLSGKLPT

SEQ ID NO: 337 - DNA, 1149 bp, Glycine max
  CDS (1)..(1149)
atgggttccatcagagggatcaagaagaggaagaaggctgacaacaaagatggccaagatgcctctgcaacctcattcgattggtggcatcacttctccctcagaatctcagctcgatctaaaaatatagagaaatttgagtctgttttcaagatctcaaggaagacgttcaactatatatgttctcttgtggaagaagacatggtggccagagcctcaaattttgttgatttaaatggaaatcgcttgtctttgaatgatcaagtagctgtagctctcagaaggcttagctctggtgagtcattgtcaaccattggtgactcatttcggatgaaccagtcaactgtttcccaggtaacatggaaatttgtggaaacaatggaagaaagagggctccaccatcttagttggccttcaactgaaatggaaatggaagagataaagtccaagtttgagaacataaggggcctttctaattgttgtggtgccattgacagtacacacataatgatgactttgccctctgtagatgccttgaatagcgtgtggattgatcgtgagaagaattgcagcatggtgttgcaagctgttgtggatccggatttgagattccatgacatagttactggatggccaggaagtatgagtgatgagcaagtgcttcgaagctcttctcttttcaaacttgctgaagaagggaagaggttgaatgggggtaagaaaacacttccagatggatcagtgttaagggaatatattataggggatacaggctttccccttttgccatggcttcttacaccttttgaaggtaaaggactgtcagatattcaagttgagtttaataaaaggattgttgaaacccaaatggtggccaagaaagcattggctaggctgaaggatatgtggaagataatccaaggtgttatgtggaagcctgataagcacaagttaccaagaattgttcttgtttgctgcatactgcataatatagttatggatatggaggatgaagtacataatgatatgctctcttgccaccagcatgattcgagatatcaagaccaaactagtgaatttgctgacaatactgccaacattatgagagagaagctatctctctacttatcaggcaaaatgccaacttga

SEQ ID NO: 338 - protein, 382 aa, Glycine max
MGSIRGIKKRKKADNKDGQDASATSFDWWHHFSLRISARSKNIEKFESVFKISRKTFNYICSLVEEDMVARASNFVDLNGNRLSLNDQVAVALRRLSSGESLSTIGDSFRMNQSTVSQVTWKFVETMEERGLHHLSWPSTEMEMEEIKSKFENIRGLSNCCGAIDSTHIMMTLPSVDALNSVWIDREKNCSMVLQAVVDPDLRFHDIVTGWPGSMSDEQVLRSSSLFKLAEEGKRLNGGKKTLPDGSVLREYIIGDTGFPLLPWLLTPFEGKGLSDIQVEFNKRIVETQMVAKKALARLKDMWKIIQGVMWKPDKHKLPRIVLVCCILHNIVMDMEDEVHNDMLSCHQHDSRYQDQTSEFADNTANIMREKLSLYLSGKMPT

SEQ ID NO: 339 - DNA, 1185 bp, Glycine max
  CDS (1)..(1185)
atggcacccatccagaaaaaatcgaagaccaagaagaagaccaagaagttcaaaaaacacaaacaggtgagcctggtccccgttgagcccagaaccagtgagaccgattggtgggactctttctggcacaagaattctactgtcccaggatatactgtacctggtgatgaggcagaagggtttaagtatttcttcagggtgtcaaagactacttttgaatacatatgttcccttgtgagggaggatctcatatcaaggcctccatcagggctcatcaacatagagggaaggcttcttagtgttgagaagcaggttgccattgcccttagaaggttggcatctggtgagtctcaggtctcagttggagctgcctttggggttggacagtcaacagtttctcaggtgacttggagattcatagaggcgctggaggaacgcgccaagcatcatctcaattggccggatttcaatcaaatgcaggaaatcaagcttggttttgaggcatcctatgggttgcctaattgctgtggagccatcgatgcaacgcacatcatgatgacccttccggctgtccaaacctcggatgattggtgtgatcaagagaagaactacagcatgttgttgcagggaattgttgatcatgaaatgagatttgttgatatcgtgacaggtttgcctgggggcatgtcggtttccagattgttgaagtgttcggcatttttcaagctatcagagaatggagagcgtttaaatggaaacgtgaaagctttcggtggagatgttataagagaatatgtggttggtgggtgcagttatcctcttcttccgtggcttatgactccttatgaaactaatggggctaatggcgtatcagttccgcagtctactttcaatcacaaacatggagctgcaaagctacttgctgtgagggcattctcactgttaaagggaagttggagaatcctgagtaaggttatgtggagacctgataagaggaaattgccaagcattatcttaacatgttgtttgctccataatataatcattgactgtggagacaccttacaacaggacgttgccttgtctggtcatcatgattctggatatcaagaacaatgttgcaagcaagttgatcctttggggaggaccatgagagataatttggccaaccatttgcgacagtaa

SEQ ID NO: 340 - protein, 394 aa, Glycine max
MAPIQKKSKTKKKTKKFKKHKQVSLVPVEPRTSETDWWDSFWHKNSTVPGYTVPGDEAEGFKYFFRVSKTTFEYICSLVREDLISRPPSGLINIEGRLLSVEKQVAIALRRLASGESQVSVGAAFGVGQSTVSQVTWRFIEALEERAKHHLNWPDFNQMQEIKLGFEASYGLPNCCGAIDATHIMMTLPAVQTSDDWCDQEKNYSMLLQGIVDHEMRFVDIVTGLPGGMSVSRLLKCSAFFKLSENGERLNGNVKAFGGDVIREYVVGGCSYPLLPWLMTPYETNGANGVSVPQSTFNHKHGAAKLLAVRAFSLLKGSWRILSKVMWRPDKRKLPSIILTCCLLHNIIIDCGDTLQQDVALSGHHDSGYQEQCCKQVDPLGRTMRDNLANHLRQ

SEQ ID NO: 341 - DNA, 1179 bp, Glycine max
  CDS (1)..(1179)
atggcacccttccagaaaaaatcaaagacaaaaaagaagaccaagaagttcaaaaaacacaaacaggtgagcatggtccccattgagcccagaaccagtgagaccgattggtgggactctttctggcacaagaattctactgtcccaggatatactgtacctggtgatgaggcagaagggtttaagtatttcttcagggtgtcaaagactacttttgaatacatatgttcccttgtgagggaggatctcatatcaaggcctccatcaggactcatcaacatagagggaagacttcttagtgttgagaagcaggttgcaattgcccttagaaggttggcatctggtgagtctcaggtctcagttggagccgcctttggggttgggcagtcaacagtgtctcaggtgacttggagatttattgaggcgctggaggaacgcgccaagcatcatctcaattggccagatttcaataggatgcaggaaatcaagcttggttttgaggtatcctatgggttgcctaattgctgtggagccattgatgcaacgcatatcatgatgacccttcccgctgtccaaacctcagatgattggtgtgatcaagagaagaactacagcatgttgttgcagggaattgttgatcatgaaatgagatttattgatatcatgacaggcttgcctgggggcatgtcagtttccagattgttgaagtgttcggcatttttcaagctatcggagaatggagagcgtttaaatggaaatgtgaaagcttttggtggagatgttataagagagtatgtggttggtgggtgcagctatcctcttcttccgtggcttatgactccttatgaaactaatggggctaatggcatatcagtttcacagtctattttcaatcacaaacatggagctgcaaagctacttgctgtgagggcattctcactgttaaagggaagttggagaatcttgagtaaggttatgtggagacctgataagaggaaattgcccagcattattttaacatgttgtttgctccataatataatcatagactgcggagacaccttacaacaggacgttgccttgtctggtcatcatgattctggatatcaagagcaatgttgcaagcaagttgatcctttggggaggaccatgagagataatttggccaagcatttgtga

SEQ ID NO: 342 - protein, 392 aa, Glycine max
MAPFQKKSKTKKKTKKFKKHKQVSMVPIEPRTSETDWWDSFWHKNSTVPGYTVPGDEAEGFKYFFRVSKTTFEYICSLVREDLISRPPSGLINIEGRLLSVEKQVAIALRRLASGESQVSVGAAFGVGQSTVSQVTWRFIEALEERAKHHLNWPDFNRMQEIKLGFEVSYGLPNCCGAIDATHIMMTLPAVQTSDDWCDQEKNYSMLLQGIVDHEMRFIDIMTGLPGGMSVSRLLKCSAFFKLSENGERLNGNVKAFGGDVIREYVVGGCSYPLLPWLMTPYETNGANGISVSQSIFNHKHGAAKLLAVRAFSLLKGSWRILSKVMWRPDKRKLPSIILTCCLLHNIIIDCGDTLQQDVALSGHHDSGYQEQCCKQVDPLGRTMRDNLAKHL

SEQ ID NO: 343 - DNA, 1197 bp, Oryza sativa
  CDS (1)..(1197)
atggaagcctccctctgcagcatggcgccgttgcgcggggccaagcgccggaggaaggcggcggcggagaagaaggctgcaatggcggcggccgctgcggcgggtggcgcgcccggagcaggcggcggcgactggtgggacggcttctgcatgcggatgtcaggaaccttgtctggtatacaggatgcacaaagatttgagtttatcttcaaaatgccaaggagaaccttcaactacatctgtggtttggtgagagatgaaatgatggtgaggtctagcagctatacctttcttgatgggaaggtgctgtctttagaagatcgggtggcggtggctctgataaggttgaattctggcggatcactagtgactgtaggatctgctgttggtgtaaaccactcaaccgtgtcactgattacttggaggtttgttgaggctatggaggagcgagcaagccaccatttgcggtggccagattccagtgaagtggagaagatcaaatccatgtttgagaagatacatggtttgccaaactgctgcggtgttgtagacacaacacatatcacaatgtgcctttcttcagctgagccaaactgtaaggtctggctagaccatgagaaaaattacagcatggtcttgcaagctgttatcagtccagatatgaggttcatggacattgtgacagggtggcctggtagcatgaaagagtcgagcattttgcatagctctggtcttttcaagatgtgcgagaaaggagcacggcttaacggcagcaagatggtagtgtctgatgggtcagaaattggtgaatacataattggtgatgcaggatacccccttcttccctggcttctcacaccgtaccaagaaaaggacctctcagattctaagctggagttcaataagagacacgcagcggccataacagttgctccaagtacattggcgaacttcaaggacacatggaaattcctgcatggcgagatgtggcgccccgacaagcacaggctgcctcggataatccatgtgtgctgcatgctgcacaacataatcatatgccttcaggatgcaaccatcgacgaggcagccatgtcgaacgatcacgacgcgaattacaagcagcaggtgtgccagttagcagatgagaatgctgtgagggtgagggacaaactgtctgagcacttggtcagcaggtga

SEQ ID NO: 344 - protein, 398 aa, Oryza sativa
MEASLCSMAPLRGAKRRRKAAAEKKAAMAAAAAAGGAPGAGGGDWWDGFCMRMSGTLSGIQDAQRFEFIFKMPRRTFNYICGLVRDEMMVRSSSYTFLDGKVLSLEDRVAVALIRLNSGGSLVTVGSAVGVNHSTVSLITWRFVEAMEERASHHLRWPDSSEVEKIKSMFEKIHGLPNCCGVVDTTHITMCLSSAEPNCKVWLDHEKNYSMVLQAVISPDMRFMDIVTGWPGSMKESSILHSSGLFKMCEKGARLNGSKMVVSDGSEIGEYIIGDAGYPLLPWLLTPYQEKDLSDSKLEFNKRHAAAITVAPSTLANFKDTWKFLHGEMWRPDKHRLPRIIHVCCMLHNIIICLQDATIDEAAMSNDHDANYKQQVCQLADENAVRVRDKLSEHLVSR

SEQ ID NO: 345 - DNA, 2646 bp, Arabidopsis thaliana; identical to SEQ ID NO: 132
  CDS (1)..(2646)

SEQ ID NO: 346 - protein, 881 aa, Arabidopsis thaliana; identical to SEQ ID NO: 133

SEQ ID NO: 347 - DNA, 3117 bp, Glycine max
  CDS (1)..(2709)
atggggtcgaaaccgtggctataccctgctccaacctatcgaactatagaaaccttctgggtcaccgatgaagacgcacccggccctcgctgtggccacaccctcaccgccgttgccgccaccaagactcaaggcccccgcttgatcctattcggcggcgcaaccgccattgaaggaggatcttcctctgcccccggcattcggttagcgggagtcactaataccgtccattcctatgacgttcaaagtagaaaatggactagtatcaaacccgccggagagccgccgtctcctcgggctgctcatgctgctgctgcagttggtaccatggttgtttttcagggtgggataggtccagcggggcattctaccgatgatctctatgtgcttgacttgaccaatgataaatacaaatggcatagggtcgttgtacaagggcaaggacccgggcctcgctatggccatgtaatggacctggttgctcagagatatctagtaactgtcagcggaaatgacggaaaaagagttgtatctgatgcttgggcttttgatactgctcaaaaaccttatgtgtggcagaagctgaacccagaaggtgacagaccttctgcaagaatgtatgcaactgctagtgcccgctcagatggaatgtttttgctctgtggtggaagagactcttctggagctccactagcagatgcctatggactgctcatgcataggaatggccagtgggaatggacccttgcacctggagtttccccttcaccaaggtatcaacatgctgcggtttttgtcggtgcacgattacatgttacaggtggtgttctcaggggtggacggtccgtggaaggtgaagcatccattgcagtattggacactgctgctggggtttggttagatagaaacggcattgtgtcctcctcacgctcaaacaaaggtcatgattatgacccttctttggagcttatgcgtcgttgtcgtcatgcagctgcagctgttggtgttcatatatttatctatggtggtttaagaggagatatactactagatgatttcctagtggctgaaaattcgccattgcagcctgacattaattctcctgagagagcttcacctgttacaagctccaaacaaaatcaatctaacttaaattataatgtaacaacaccaaatttggatgaagctcaacacttctacttcacttttcttatgctcgggttatttcaattttatgacgtgatatgtaaactgagggaagcatcagctgctgaagctgaggcagcgagtgctgtctggcaagctgtgcaggctatatcaagtaatcctgctgaagaaacatctgtgtcagatgacaactcacaagctgtggaaacagtttcagatggaagtgatacagagggagatgtccgccttcatcctagagctgttgtagttgcgaaggaggctttaggtaacctaggtggaatggtgagacaattatcgctagatcaatttgaaaatgaaagtagacgcatgattcccgtaaataatgatttgccatatcctacgaaaaagttcaccaggcagaaatctcctcaggaccatctcttattatcactgtcttcctgccagataatttcaactttgcttaggcctcgcaactggaaagctcctgcaaacaggcggttcttcttggattcttatgaagtgggtgaactttgctatgctgctgagcaaatatttatgcatgaaccgaccgtacttcagctgaaagctcctgtcaaagtatttggtgatcttcatggtcagtttggtgatttgatgcggctatttgatgaatatggatttccttctactgcaggagacatcacctatattgactacctgtttttgggagattatgtcgatcgaggacagcacagcttggaaaccattaccttgctacttgctcttaaggcaggcctgtttaattttacattatttaactatctgatcgaatatcccgagaatgttcacttgatacgtggaaaccacgaagctgctgacataaatgcactatttggttttcgtattgagtgcattgaaagaatgggtgaaaatgatgggatatgggcatggacacgattcaatcaactttttaactatcttccattagctgctcttattgaaaagaaaattatctgtatgcatggtggcattggaagatcgatcaattcagtagaacagatagagaagcttgaaaggcccataacaatggatacaggatctattactttaatggaccttttatggtctgatcccacagagaatgatagtgtagagggtttgagaccaaatgctagaggcccagggcttgttacttttgggcctgatcgtgtcacagaattttgtaagaaaaataaattgcagctcattataagggcccatgagtgtgtcatggatggctttgaacgatttgcccagggacaattaatcacccttttctctgcaactaactattgtggaactgcaaacaatgcgggagctatactggtagttggtaggggtttggttgtagttccaaaattaattcatcccataccacctccccttcagtctcctgagacatctcctgagcgtgttatggatgaaacatggatgcaggagcttaatattcagaggccaccaactcctactcggggtcgacctcagccggaccttgatcgtggctcactagcatatatatgatttgattcacgacttgaataaatactgcatattcgggatttttcatcatcgcttgatatcctgccaaccaaaagttctgtttctaaacctgtcattgttggcagaatacatattttgtactagattcttctttagttgcagaaaagcaaactctcattagcatgcaaatagcttgagagagtgcattattttatgttagccaattagcgaatggcttgtggagattggttttactaggcacgggacatggataaagtggaagagatgctagtggcttctccccctcaacatggggatggataacttagtcagggaataccgatgtttggtatatatattgtatcatagagaaatatatatatatatatatattttttcctttatataaatgttcataacatttagatc

SEQ ID NO: 348 - protein, 902 aa, Glycine max
MGSKPWLYPAPTYRTIETFWVTDEDAPGPRCGHTLTAVAATKTQGPRLILFGGATAIEGGSSSAPGIRLAGVTNTVHSYDVQSRKWTSIKPAGEPPSPRAAHAAAAVGTMVVFQGGIGPAGHSTDDLYVLDLTNDKYKWHRVVVQGQGPGPRYGHVMDLVAQRYLVTVSGNDGKRVVSDAWAFDTAQKPYVWQKLNPEGDRPSARMYATASARSDGMFLLCGGRDSSGAPLADAYGLLMHRNGQWEWTLAPGVSPSPRYQHAAVFVGARLHVTGGVLRGGRSVEGEASIAVLDTAAGVWLDRNGIVSSSRSNKGHDYDPSLELMRRCRHAAAAVGVHIFIYGGLRGDILLDDFLVAENSPLQPDINSPERASPVTSSKQNQSNLNYNVTTPNLDEAQHFYFTFLMLGLFQFYDVICKLREASAAEAEAASAVWQAVQAISSNPAEETSVSDDNSQAVETVSDGSDTEGDVRLHPRAVVVAKEALGNLGGMVRQLSLDQFENESRRMIPVNNDLPYPTKKFTRQKSPQDHLLLSLSSCQIISTLLRPRNWKAPANRRFFLDSYEVGELCYAAEQIFMHEPTVLQLKAPVKVFGDLHGQFGDLMRLFDEYGFPSTAGDITYIDYLFLGDYVDRGQHSLETITLLLALKAGLFNFTLFNYLIEYPENVHLIRGNHEAADINALFGFRIECIERMGENDGIWAWTRFNQLFNYLPLAALIEKKIICMHGGIGRSINSVEQIEKLERPITMDTGSITLMDLLWSDPTENDSVEGLRPNARGPGLVTFGPDRVTEFCKKNKLQLIIRAHECVMDGFERFAQGQLITLFSATNYCGTANNAGAILVVGRGLVVVPKLIHPIPPPLQSPETSPERVMDETWMQELNIQRPPTPTRGRPQPDLDRGSLAYI

SEQ ID NO: 349 - DNA, 3033 bp, Glycine max
  CDS (1)..(3033)
atggacgttgattcctcgatggtgccggagcccgatcacgatccgccggtgcagaaccatgccgagagagaccagctaggagactcaccgtcgccgtcgttgtcggaggggggcggatctctggctcagtcgccgcctcaacaacagcagcagcagcagcaacagccgccgccggccacggcggctcaggtgcaccagcccaattctctggttggtccgaggctcgcgccgacatactcagtggtaaatgcgattttggagaagaaggaggacgggcccgggccgcggtgcggccacacgttgacggcggtggcggcggtcggagaggaggggacgtcggggtacattggtccgaggctgattttgttcggcggtgccactgcccttgaagggaattccgcggcctcagggactccttcatccgccggaaatgctggcatacgtttagctggtgccactgctgatgtccactgttatgatgtcataagtaataaatggtctaggataactcccattggcgagcctccaaccccaagggctgcacatgtggcaactgctgtgggtaccatggtagttattcagggtggcattggccctgctggtttgtctgcagaggaccttcatgttcttgatctcacacagcaacggccacgatggcatagagttggtgttcctggccctggaccgggaccacgctatggacatgttatggctttggtggggcagaggtatctcatggcaatcggaggcaatgatggaaagagacctttggctgatgtatgggccttggacacagccgccaagccttatgaatggcgcaagttggagccagaaggagagggtccacctccatgcatgtatgcaactgccagtgcacgctctgatgggcttcttctgctttgtggagggagggatgccaatagtgttccattgtcaagtgcatatggacttgctaagcatagagatggtcgttgggaatgggccattgcccctggtgtctcgccatctccaagatatcagcatgcagcggtatttgttaatgcaaggctccatgtgtctggtggggcccttggaggaggacggatggttgaagattcatcgagtgttgcagtgttggacactgctgctggtgtttggtgtgataccaaatctgttgttaccagtccaagaacgggtagatacagcgctgatgcagcaggtggagatgctgcagttgagttgacacggcgttgtaggcatgcggctgctgctattggcgacttaatttttatttatggtggtttacgtggcggtgtcttgctggatgacctacttgttgctgaagatcttgctgctgctgaaacaacaactgctgcttcacatgctgcagcagcagcagctgcgtctaatgtacaagctggacggctacctggacggtatggatttattgatgataggacaaggcaaaccatgcccgaagcagcttctgatggttcagtagttttgggaaatccagttgccccccctgtaaatggcgatatgtatactgatatcagcactgaaaatgccttgctcccgggaactaggcgaacgagcaaaggagttgagtatctagttgaagcatcagctgcggaagctgaagctatcagtgccacactggctgctgctaaggcacggcaagtgaacggcgaagtggaattgcctgaccgagaccgtggggctgaggcaacacctagcgggaaacagatatcttccttgattaagcctgattctgctgggtcaaatagcattcctcctggtggagtgaggctgcatcacagagctgtggttgttgctgcagagactggtggagcattaggtggcatggttagacagctttcaattgatcagtttgagaatgaaggcaggcgggtcagttatgggactcctgaaagtgcaacagctgctagaaaattattagaccggcagatgtctatcaatagtgtcccaaagaaggttgtagctcaccttttaaagcctcgtggctggaaaccgcccgttcgccgacagtttttcttagactgcaatgaaattgcagatctttgtgatagtgcagaacgcatattttcaagtgaaccgagtgtcttacagcttagggctccaattaaaatatttggtgatttgcatgggcaatttggagatctcatgcgcctctttgaagagtatggtgcaccatcaactgctggtgacatagcatatatcgactatctattcctcggagattatgttgataggggccaacacagcctggaaactattagccttctgcttgctctgaaggttgagtatccaaacaatgtacatttaatacgtggaaaccatgaagctgcagatattaatgccctttttggtttccgaattgagtgcattgagaggatgggtgagagagacggaatttggacatggcaccgtataaaccgtctgtttaattggcttcctctagcagccctaattgagaaaaaaattatttgcatgcatgggggtattggtcgttcaataaatcatgtggaacaaattgagaatattcagcgtccaattacgatggaagcaggatcaattgtgcttatggatctattatggtctgatcctacagagaatgacagtgttgaaggactgcgaccaaatgctaggggtccaggattagtcacttttgggcctgatcgtgtaatggaattttgcaacaacaatgatcttcagctgattgttcgtgcacatgaatgtgtgatggatggctttgagcgttttgcccagggacatttgatcacacttttctctgctacaaactactgtggtacggcaaataatgctggggcaatattagttttgggtagagatctcgttgtggttcctaaattgattcatccattaccgcctgcaatttcttcaccagatacgtcaccagaacgtcatattgaggatacatggatgcaggagttgaatgctaacagaccaccaacaccaactagaggccgtcctcaagtaacaaatgaccgaggttctcttgcttggatatag

SEQ ID NO: 350 - protein, 1010 aa, Glycine max
MDVDSSMVPEPDHDPPVQNHAERDQLGDSPSPSLSEGGGSLAQSPPQQQQQQQQQPPPATAAQVHQPNSLVGPRLAPTYSVVNAILEKKEDGPGPRCGHTLTAVAAVGEEGTSGYIGPRLILFGGATALEGNSAASGTPSSAGNAGIRLAGATADVHCYDVISNKWSRITPIGEPPTPRAAHVATAVGTMVVIQGGIGPAGLSAEDLHVLDLTQQRPRWHRVGVPGPGPGPRYGHVMALVGQRYLMAIGGNDGKRPLADVWALDTAAKPYEWRKLEPEGEGPPPCMYATASARSDGLLLLCGGRDANSVPLSSAYGLAKHRDGRWEWAIAPGVSPSPRYQHAAVFVNARLHVSGGALGGGRMVEDSSSVAVLDTAAGVWCDTKSVVTSPRTGRYSADAAGGDAAVELTRRCRHAAAAIGDLIFIYGGLRGGVLLDDLLVAEDLAAAETTTAASHAAAAAAASNVQAGRLPGRYGFIDDRTRQTMPEAASDGSVVLGNPVAPPVNGDMYTDISTENALLPGTRRTSKGVEYLVEASAAEAEAISATLAAAKARQVNGEVELPDRDRGAEATPSGKQISSLIKPDSAGSNSIPPGGVRLHHRAVVVAAETGGALGGMVRQLSIDQFENEGRRVSYGTPESATAARKLLDRQMSINSVPKKVVAHLLKPRGWKPPVRRQFFLDCNEIADLCDSAERIFSSEPSVLQLRAPIKIFGDLHGQFGDLMRLFEEYGAPSTAGDIAYIDYLFLGDYVDRGQHSLETISLLLALKVEYPNNVHLIRGNHEAADINALFGFRIECIERMGERDGIWTWHRINRLFNWLPLAALIEKKIICMHGGIGRSINHVEQIENIQRPITMEAGSIVLMDLLWSDPTENDSVEGLRPNARGPGLVTFGPDRVMEFCNNNDLQLIVRAHECVMDGFERFAQGHLITLFSATNYCGTANNAGAILVLGRDLVVVPKLIHPLPPAISSPDTSPERHIEDTWMQELNANRPPTPTRGRPQVTNDRGSLAWI

SEQ ID NO: 351 - DNA, 2967 bp, Glycine max
  CDS (1)..(2967)
atggatgtcgattcctcgatggtgccggagaccgatcacgatccggccgcgcagaaccacgccgccgctgctccggctccggacgcggcggagggagagcagctagcggagccgccgtcgtccggagacggatctccggagcaggcggctgcttcagcgccgcagagtccggtggtcggaccgaggctggcgccaacttacacagtggtgaatgcaattttggagaagaaggaggacggaccggggccgaggtgcggccacacgttgacggcggtggcggctgtcggagaggaggggacgccggggtacattggtccgaggctgattttgttcggtggtgccactgctcttgaaggcaattctgcggcgtcaggaactccttcatctgctggaaatgctggcatacgtttagctggtgccacagctgatgtccactgttatgatgtcttgactaataaatggtctaggataactccctttggagaacctcctactccaagggctgcacatgtggcgactgctgtaggaactatggtggttattcagggtggcattggtcctgctggtttgtcagcagaggaccttcatgttcttgatctcactcagcaatggccacgctggcatagagtgtctgttcagggacctggacccgggccacgctatggacatgtaatggctttggtggggcagaggtatctaatggcaattggaggcaatgatggaaagagacctttggctgatgtatgggccttggacacagctgctaagccttatgaatggcgcaagctagagccagaaggagagggcccgcctccttgcatgtatgcaactgcaagtgcacgctctgatggacttcttctgctttgtggaggcagggatgccaatagtgttccattgtcaagtgcatatggacttgctaaacatagagatggtcgttgggaatgggcaattgccccaggtgtctcaccatcaccaagatatcagcatgcagcggtatttgttaatgcaaggctccatgtgtctggtggggctcttggtggaggacggatggttgaagactcatcaagtgttgcagtattggacactgctgctggtgtttggtgtgatacaaaatctgttgttaccagtccaagaactggtagatacagtgctgatgcagcaggaggagatgctgcagttgagttgactcggcgttgtaggcacgcagctgctgctgttggtgacctaatttttatttatggtggtttacgtgggggagtcttgctagatgacctacttgttgctgaagatcttgctgctgctgaaacaacagctgcatctaatgtacaagcaggacgcttacctgaacgatatggatttgctgatgatagaacgagggaaacaatgcctgaggcggctgctgatggttctgttgttttgggaaatcctgttgcgccaccaatgaatggtgacatttatactgatatcagcactgaaaatgccatgcttcagggacctcggcgaactgctagaggtgtggagtatctggttgaagcatcagctgcagaagctgaagctatcagtgcagcactggctgctgccaaggcacggcaggagaatggagaagttgaattgcctgacagagaccgtggggcggaggctaccccaagcgggaaagaaacatcttccttgattaagcctgattctgcaggttcaaataacattactcctggtggagttcggctgcatcacagagctgtggttgttgctgcagagactggtggagcattaggtggcatggttagacagctttcaatagatcaatttgaaaatgaaggcaggcgggttggttacgggactccagaaaatgcaactgctgccaggaaattattagatcgacagatgtctatcaatagtgtgccaaaaaaggtcattgcacacctcttaaagcctcgtggatggaaaccaccagtacgccggcagtttttcttagattgtaatgaaattgctgatctttgtgacagtgctgagcggatattttcaagtgaaccaagtgtcttgcaacttagggcaccaattaaaatatttggtgatctacatggacagtttggtgatctcatgcgcctttttgatgagtatggtgcaccatcaactgctggtgacattgcatatatcgattatctattcctaggagattatgttgatcggggacagcacagcttggaaactataacccttcttcttgctctgaaggttgagtatcccaacaatgtacatttaatacgtggaaaccacgaagctgcagatattaatgcactgtttggtttccgaattgagtgcatagagaggatgggtgagagagacggaatttggacatggcatcggataaacaagctgtttaattggcttcctctggcagctttaattgagaaaaaaattatttgcatgcacggtggtattggtcgttcaataaatcatgtagaacagattgaaaacattcagcgtccaattcctatggaagctggatcaattgtgcttatggatctattgtggtctgatcctacagagaatgacagtgtggaaggattgcgaccaaatgctagaggtcctggattagttacttttgggcctgatcgggtcatggaattttgtaacaacaatgatcttcagttgattgttcgtgcacatgaatgtgtgatggatgggtttgagcgttttgctcagggacatttgatcacacttttttcagcgactaattattgtggtaccgcaaataatgctggggcaatattagttttgggtagagacctcgttgttgttcctaaactaatccatccattaccaccagcaatttcttcaccagaaacatcaccagaacgtcatattgaagatacatggatgcaggagttgaatgctaacagaccaccaacgccaactagaggtcgccccccagtaacaaatgaccgaggttcgctggcttggatatag

SEQ ID NO: 352 - protein, 988 aa, Glycine max
MDVDSSMVPETDHDPAAQNHAAAAPAPDAAEGEQLAEPPSSGDGSPEQAAASAPQSPVVGPRLAPTYTVVNAILEKKEDGPGPRCGHTLTAVAAVGEEGTPGYIGPRLILFGGATALEGNSAASGTPSSAGNAGIRLAGATADVHCYDVLTNKWSRITPFGEPPTPRAAHVATAVGTMVVIQGGIGPAGLSAEDLHVLDLTQQWPRWHRVSVQGPGPGPRYGHVMALVGQRYLMAIGGNDGKRPLADVWALDTAAKPYEWRKLEPEGEGPPPCMYATASARSDGLLLLCGGRDANSVPLSSAYGLAKHRDGRWEWAIAPGVSPSPRYQHAAVFVNARLHVSGGALGGGRMVEDSSSVAVLDTAAGVWCDTKSVVTSPRTGRYSADAAGGDAAVELTRRCRHAAAAVGDLIFIYGGLRGGVLLDDLLVAEDLAAAETTAASNVQAGRLPERYGFADDRTRETMPEAAADGSVVLGNPVAPPMNGDIYTDISTENAMLQGPRRTARGVEYLVEASAAEAEAISAALAAAKARQENGEVELPDRDRGAEATPSGKETSSLIKPDSAGSNNITPGGVRLHHRAVVVAAETGGALGGMVRQLSIDQFENEGRRVGYGTPENATAARKLLDRQMSINSVPKKVIAHLLKPRGWKPPVRRQFFLDCNEIADLCDSAERIFSSEPSVLQLRAPIKIFGDLHGQFGDLMRLFDEYGAPSTAGDIAYIDYLFLGDYVDRGQHSLETITLLLALKVEYPNNVHLIRGNHEAADINALFGFRIECIERMGERDGIWTWHRINKLFNWLPLAALIEKKIICMHGGIGRSINHVEQIENIQRPIPMEAGSIVLMDLLWSDPTENDSVEGLRPNARGPGLVTFGPDRVMEFCNNNDLQLIVRAHECVMDGFERFAQGHLITLFSATNYCGTANNAGAILVLGRDLVVVPKLIHPLPPAISSPETSPERHIEDTWMQELNANRPPTPTRGRPPVTNDRGSLAWI

SEQ ID NO: 353 - DNA, 2715 bp, Glycine max
  CDS (1)..(2715)
atggacgttgattcctcgatggtgccggagcccgatcacgatccgccggtgcagaaccatgccgagagagaccagctaggagagtcaccgtcgccgccgccgtcggagggaggcggatctccggcgcaaccgcaccaacagccgctgcctccgacggcggctcaggtgcaacagcccaatccgctggttggtccgaggctcgcgccgacttactcagtggtgaatgcgattttggagaagaaggaggacgggccggggccgcggtgcggccacacgttgacggcggtggcggcggttggagaggaggggacgccggggtacattggcccgaggctgattttgttcggcggtgccactgcgcttgaagggaattccgcggtctcagggactccttcatctgctggaaatgctggcatacgtttagctggtgccactgctgatatccactgttatgatgtcataactaataaatggtctaggataactcccattggcgagcctccatcctcaagggctgcacatgtggcaactgctgttggaaccatggtagttattcagtgggttctgaatgtctttagagttggtgttcctggccctggaccagggccacgctatggacatgttatggctttggtggggcagaggtatgcaactgccagtgcacgctctgatgggcttcttctgctttgtggagggagggacgccaatagtgttgtatttgttaatgcaaggctccatgtgtctggtggggcccttggaggaggacgcatggttgaagattcatcgagtgttgcagtgttggacactgctgctggtgtttggtgtgataccaaatctgttgttaccagtccaaggacgggtagatacagtgctgatgcagcaggtggagatgctgcagttgagttgacacggcgttgtaggcatgcggctgctgctattggtgacttaatttttatttatggtggtttacgtggtggtgtcttgctggatgacctacttgttgctgaagatcttgctgctgctgaaacaactgctgcttcacatgctgctgcagcagcagcagcatctaatgtacaggccggacggctacctggacggtatggatttattgatgataggacaaggcaaaccatgcctgaaacagatcctgatggttcagtagttttgggaaatccagttgccccccctgtaaatggcgacatgtatactgatatcagcactgaaaatgccttgctcccgggatctaggcgaacgagcaaaggagttgagtatctagttgaagcatcagctgcagaagctgaagctatcagtgccacactggctgctgctaaggcacggcaagtgaacggtgaagttgaattgcctgaccgagaccgtggggctgaggcaacacctagcgggaaacaaatatcttccttgattaagcctgattctgctgggtcaaatagcattcctcctggtggagtgaggctgcatcacagagctgtggttgttgctgcagagactggcggagcattaggtggcatggttagacagctttcaattgaccagtttgagaatgaaggcaggcgggtcagttatgggactcctgaaagtacaacagctgctagaaaattattagaccggcagatgtctatcaatagtgtcccaaaaaaggttgtagctcaccttttaaagcctcgtggctggaaaccaccagttcgtcgacagtttttcttggactgcaatgaaattgcagatctttgtgatagtgcagaacgcatattttcaagtgaaccgagcgtgttacagcttagggctccaattaaaatatttggtgatttacatgggcaatttggagatctcatgcgcctctttgatgagtatggtgcaccatcaactgctggtgacatagcatacattgactatctattcctcggagattatgttgataggggccaacacagcctggaaactatcagccttctgcttgctctgaaggttgagtatccaaacaatgtacatttaatacgtggaaaccatgaagctgcagatattaatgccctttttggtttccgaattgagtgcattgagaggatgggtgagagagatggaatttggacatggcaccgtataaaccgtctgtttaattggcttcctctggctgccctaattgagaaaaaaattatttgcatgcatgggggtattggccgttcaataaatcatgtggaacaaattgaaaatattcagcgtccaattacgatggaagcaggatcaattgtgcttatggatctattatggtctgatcctacggagaatgacagtgttgaagggctgcggccaaatgctaggggtccaggattagtcacttttgggcctgatcgagtaatggaattttgcaacaacaatgatcttcagctgattgttcgtgcacatgaatgtgtgatggatggctttgagcgttttgcccaggggcatttgatcacacttttctctgctacaaactactgtggtacggcaaataatgctggggcaatattagttttgggtagagatctcgttgtggttcctaaattgattcatccattaccgcctgcaatttcttcaccagaaacgtcaccggaacgtcatattgaggatacatggatgcaggagttgaatgctaacagaccaccaacaccaactagaggccgtcctcaagtaacaaacgaccgaggttctcttgcttggatatag

SEQ ID NO: 354 - protein, 904 aa, Glycine max
MDVDSSMVPEPDHDPPVQNHAERDQLGESPSPPPSEGGGSPAQPHQQPLPPTAAQVQQPNPLVGPRLAPTYSVVNAILEKKEDGPGPRCGHTLTAVAAVGEEGTPGYIGPRLILFGGATALEGNSAVSGTPSSAGNAGIRLAGATADIHCYDVITNKWSRITPIGEPPSSRAAHVATAVGTMVVIQWVLNVFRVGVPGPGPGPRYGHVMALVGQRYATASARSDGLLLLCGGRDANSVVFVNARLHVSGGALGGGRMVEDSSSVAVLDTAAGVWCDTKSVVTSPRTGRYSADAAGGDAAVELTRRCRHAAAAIGDLIFIYGGLRGGVLLDDLLVAEDLAAAETTAASHAAAAAAASNVQAGRLPGRYGFIDDRTRQTMPETDPDGSVVLGNPVAPPVNGDMYTDISTENALLPGSRRTSKGVEYLVEASAAEAEAISATLAAAKARQVNGEVELPDRDRGAEATPSGKQISSLIKPDSAGSNSIPPGGVRLHHRAVVVAAETGGALGGMVRQLSIDQFENEGRRVSYGTPESTTAARKLLDRQMSINSVPKKVVAHLLKPRGWKPPVRRQFFLDCNEIADLCDSAERIFSSEPSVLQLRAPIKIFGDLHGQFGDLMRLFDEYGAPSTAGDIAYIDYLFLGDYVDRGQHSLETISLLLALKVEYPNNVHLIRGNHEAADINALFGFRIECIERMGERDGIWTWHRINRLFNWLPLAALIEKKIICMHGGIGRSINHVEQIENIQRPITMEAGSIVLMDLLWSDPTENDSVEGLRPNARGPGLVTFGPDRVMEFCNNNDLQLIVRAHECVMDGFERFAQGHLITLFSATNYCGTANNAGAILVLGRDLVVVPKLIHPLPPAISSPETSPERHIEDTWMQELNANRPPTPTRGRPQVTNDRGSLAWI

SEQ ID NO: 355 - DNA, 2679 bp, Glycine max
  CDS (1)..(2679)
atggggtcgaaaccgtggctgtaccctgctccaacctatcgaactatagaaactgtctgggacaccgatgaagacgctcctggccctcgttgtggccacaccctcaccgccgtcgctgccaccaagactctaggcccccgcttgatcttattcggcggcgccaccgccattgaaggaggatcttcctccgctcccggcattcgattagcaggagtcacgaataccgtccatgcctatgacgttcaaagtagaaaatggactagtgttaaacccgccggagaaccgccatctccccgggctgctcatgccgctgctgcagttggaaccatggttgtttttcagggtgggataggtccggcggggcattctaccgatgatctctatgtgcttgacttgaccaatgataaatacaaatggcacagggtcgttgtacaagggcaaggacctggtccacgctatggccatgcaatggacttggttgctcagagatatctagtaactgtcagcggaaatgacgggaaaagagttgtatctgatgcttgggctttggatactgctcaaaaaccttatgtgtggcagaagctgaacccagaaggtgacagaccttctgccagaatgtacgcaactgctagtgctcgctcagatggaatgtttttactctgtggtggaagagactcttctggagctccactagcagatgcctatggactgctcatgcataggaatggccagtgggaatggacccttgcaccgggagtttccccttcacctaggtatcaacatgctgcggtttttgttggtgcacgattacatgttacaggaggtgttctcaggggtggacggtccgtggaaggtgaagcatccattgcagtattggacactgctgctggggtttggttggacagaaatggcattgtgtcctcctcacgctcaaacaaaggtcatgattatgaccctcctttggagcttatgcgtcgttgtcgccatgcagcagcagctgttggtgttcatatatttatctatggtggtctaagaggagatatactactagatgatttcctagtggctgaaaattcgccattgcagcctgacattaattcttctgagagagcttcacctgttacaagctccaaacaaaatcaatctaacttgacttataatgtaacagcaccaaatttggatggtggaccagatactccttcatttggtcactcaggcatggacaaaaattccttggagaaactgagggaagcatcagctgctgaagctgaggcagcgagtgctgtctggcaagctgtgcagtctatatcaagtaatccagctgaagaaacatctctgtcagatgaaaactcacaagctgcagaaacagtttcagatggaagtgacactgagggagatgtccgccttcatcctagagccgttgtagttgccaaggaggctgtaggtaacctaggtggaatggtgagacaattatcgctagatcaatttgaaaatgaaagcagacgcatgattccagtaaataatgatttgccatatcctacgaaaaagttcaccaggcagaaatctcctcaggacaatctcttattatcactgtcttcttgccagataatttcaactttgcttaggcctcgcaactggaaagctcctgcaaacaggcggttcttcttggattcttatgaagtgggtgaactttgctatgctgccgagcaaatatttatgcatgaaccaaccgttcttcagcttaaagctcctgtcaaagtatttggtgatcttcatggtcagtttggtgatttgatgcggctatttgatgaatatggatttccttctactgcaggagacatcacgattgctatattgactacctgtttttgggagattacgttgatcgaggacagcatagcttggaaaccattaccttgctacttgctcttaaggcaggctactatcgaatatcctgagaatgttcacttgatacggggaaaccacgaagctgctgacataaatgcactatttggttttcggattgagtgcattgaaagaatgggtgaaaatgatgggatatgggcatggacacgattcaatcaactatttaattatcttccattagctgctcttattgaaaagaaaattatctgcatgcatggtggcattggaagatctatcaattcagtagaagatatagagaagctcaaaaggcccataacaatggatgcaggatctattattttaatggaccttttatggtctgatcccacagagaatgatagtgtagagggtttgagaccaaatgctagaggcccagggcttgtcacttttgggcctgatcgtgtcacagaattttgtaagaaaaataaattgcagctcattataagggcccatgagtgtgtcatggatggttttgaacgatttgcccagggacaattaatcacccttttttctgcaaccaactattgtggaactgcgaacaatgcgggagctatactggtagttggtaggggtttggttgtggttccaaaattaattcatcccataccacctccccttcagtctcctgagacatctcctgagcgtggtatggatgagacatggatgcaggagctcaatattcagaggccaccaactcctactcggggtcgaccacagcctgaccttgatcgtggctcactagcatacatatga

SEQ ID NO: 356 - protein, 892 aa, Glycine max
MGSKPWLYPAPTYRTIETVWDTDEDAPGPRCGHTLTAVAATKTLGPRLILFGGATAIEGGSSSAPGIRLAGVTNTVHAYDVQSRKWTSVKPAGEPPSPRAAHAAAAVGTMVVFQGGIGPAGHSTDDLYVLDLTNDKYKWHRVVVQGQGPGPRYGHAMDLVAQRYLVTVSGNDGKRVVSDAWALDTAQKPYVWQKLNPEGDRPSARMYATASARSDGMFLLCGGRDSSGAPLADAYGLLMHRNGQWEWTLAPGVSPSPRYQHAAVFVGARLHVTGGVLRGGRSVEGEASIAVLDTAAGVWLDRNGIVSSSRSNKGHDYDPPLELMRRCRHAAAAVGVHIFIYGGLRGDILLDDFLVAENSPLQPDINSSERASPVTSSKQNQSNLTYNVTAPNLDGGPDTPSFGHSGMDKNSLEKLREASAAEAEAASAVWQAVQSISSNPAEETSLSDENSQAAETVSDGSDTEGDVRLHPRAVVVAKEAVGNLGGMVRQLSLDQFENESRRMIPVNNDLPYPTKKFTRQKSPQDNLLLSLSSCQIISTLLRPRNWKAPANRRFFLDSYEVGELCYAAEQIFMHEPTVLQLKAPVKVFGDLHGQFGDLMRLFDEYGFPSTAGDITIAILTTCFWEITLIEDSIAWKPLPCYLLLRQATIEYPENVHLIRGNHEAADINALFGFRIECIERMGENDGIWAWTRFNQLFNYLPLAALIEKKIICMHGGIGRSINSVEDIEKLKRPITMDAGSIILMDLLWSDPTENDSVEGLRPNARGPGLVTFGPDRVTEFCKKNKLQLIIRAHECVMDGFERFAQGQLITLFSATNYCGTANNAGAILVVGRGLVVVPKLIHPIPPPLQSPETSPERGMDETWMQELNIQRPPTPTRGRPQPDLDRGSLAYI

SEQ ID NO: 357 - DNA, 3012 bp, Oryza sativa
  CDS (1)..(3012)
atggacgtggactcccgcatgacgacggagtcggactccgactccgacgccgccgccaccgccgccgcctccgcctcggttgctgcgcaaggaggcttagcgagcgagacctcgtcgtcgtcgtcggcctcggccccgtccacgccagggacgcccacggtagctccggctcctgcggccgcgggagccacggggcccaggccggcgccggggtacacggcggtcagcgctgtgatcgagaagaaggaggacgggccgggctgccgctgcgggcacacgctcacggcggtgccggccgtcggggaggaaggcacgccggggtacatcggcccacgcctcatcctcttcgggggcgccacggcgctcgagggcaactccgccacgccaccctcctcggccggcagtgctgggatccgtcttgccggtgccacagcagatgtccactgttatgatgtgttatcaaataagtggagcaggcttactccacaaggtgagcctccttcaccaagagccgcacatgtagcaactgcagttggaaccatggttgtcatccagggtggcattggccctgctggtttatctgccgaggatcttcatgttctagaccttacacaacaacgaccgcgatggcacagagtggtggttcaaggacctggtccaggtccacgatatgggcatgtcatggccttggttggacagaggtttttgttgacaattggtggaaatgatgggaaacggccgctggcagatgtatgggctctagatactgcagctaagccatacgaatggaggaaacttgaaccagaaggtgaaggaccgccaccatgcatgtatgccactgccagtgcacgctctgatggtcttcttttactttgtggtgggagggatgccaacagtgtgccgctggcaagtgcatatggtcttgcaaaacacagagatgggcgatgggagtgggcaatcgcccctggtgtttctccatcacccagatatcaacatgcagctgtttttgtgaatgcacgtctccatgtatcaggaggagctcttggaggtggtcggatggtagaagactcctcaagtgttgcagtgctagacacagctgctggagtctggtgcgacacaaagtcagttgtcacaactcccaggataggaagatatagtgcagatgcagcagggggtgatgctgctgttgaacttacacggcggtgcaggcatgcagctgctgctgttggtgatcaaatattcatttatggaggtctacgaggaggggtactgctagatgatcttcttgtagctgaagatcttgctgctgctgaaacgacaaccgctgctaatcatgcagcggcaagtgcagcagccactaatgtacaaagcggaagaacacccggaagatatgcttataatgatgagcgagcgagacaaacagctccagaatcagctcaggatggatctgtagttcttggaactccagttgcccctcctgtcaacggtgacatgtacactgatatcagccctgagaatgctgtgcttcagggacagaggagattaagcaaaggtgtcgattacttagttgaagcatcagcagcagaggcagaggctattagtgcaactttagctgcagtgaaggctaggcaggttaacggtgagatggagcaattgcctgacaaggagcaatctccagattccgcatcgaccagcaagcattcaagcctcatcaaaccagacagtattctctctaacaacatgacgcctccacctggggttcggttgcatcatagagctgttgtagtggctgcagaaactggaggtgccttaggtggcatggtcaggcagctgtcaattgaccaatttgaaaatgagggaagaagagtcagctatggcacccctgagaatgcaactgctgcaagaaagttgctagatcgacagatgtccattaatagtgttcctaaaaaggtgattgcatctctattgaaacctcgtggttggaagccccctgtgcgaagacagttcttcttggactgcaatgagattgcagatctatgtgatagtgctgagagaatattttcaagtgaaccaagtgttctgcaacttaaagctcctgttaagatatttggtgatttacatggtcaatttggtgacctcatgcgattgtttgatgagtatggtgctccttcaacagcaggagacattgcttacattgattatctcttcttgggtgattatgtggatcgtggccagcatagcttagaaacaatgactcttcttcttgcattgaaggttgagtatcctcagaatgtacatttgattcgtggaaatcatgaagctgcagatattaatgctttgtttggcttccgaatagagtgcatagagcgaatgggtgagagagatggtatttggacatggcaccgaatgaatagattatttaactggcttcctttggctgcacttatcgaaaagaaaattatatgtatgcatggtggaattggtcggtcaatcaaccatgttgagcaaattgagaatcttcagagaccaattaccatggaagcaggctctgttgtccttatggatcttctatggtctgatccaaccgagaatgacagtgttgaaggattgagaccaaatgctcgaggccctggccttgttacgtttgggcctgatcgtgttatggagttttgcaacaataatgatcttcaactaattgtgcgagcgcatgagtgtgtgatggatggctttgagcgctttgctcaaggtcacctgatcactcttttctctgcaacaaactattgtggtactgcaaataatgccggtgctatcttagttttgggcagagatcttgtggtcgttccaaaactgattcatcctttgcccccggcaatcacatcacctgagacctctccggagcatcatattgaggacacatggatgcaggagctgaatgcaaacagaccaccgactccaacaaggggccgcccccaagtagcagctaacgatcgaggttctcttgcctggatatag

SEQ ID NO: 358 - protein, 1003 aa, Oryza sativa
MDVDSRMTTESDSDSDAAATAAASASVAAQGGLASETSSSSSASAPSTPGTPTVAPAPAAAGATGPRPAPGYTAVSAVIEKKEDGPGCRCGHTLTAVPAVGEEGTPGYIGPRLILFGGATALEGNSATPPSSAGSAGIRLAGATADVHCYDVLSNKWSRLTPQGEPPSPRAAHVATAVGTMVVIQGGIGPAGLSAEDLHVLDLTQQRPRWHRVVVQGPGPGPRYGHVMALVGQRFLLTIGGNDGKRPLADVWALDTAAKPYEWRKLEPEGEGPPPCMYATASARSDGLLLLCGGRDANSVPLASAYGLAKHRDGRWEWAIAPGVSPSPRYQHAAVFVNARLHVSGGALGGGRMVEDSSSVAVLDTAAGVWCDTKSVVTTPRIGRYSADAAGGDAAVELTRRCRHAAAAVGDQIFIYGGLRGGVLLDDLLVAEDLAAAETTTAANHAAASAAATNVQSGRTPGRYAYNDERARQTAPESAQDGSVVLGTPVAPPVNGDMYTDISPENAVLQGQRRLSKGVDYLVEASAAEAEAISATLAAVKARQVNGEMEQLPDKEQSPDSASTSKHSSLIKPDSILSNNMTPPPGVRLHHRAVVVAAETGGALGGMVRQLSIDQFENEGRRVSYGTPENATAARKLLDRQMSINSVPKKVIASLLKPRGWKPPVRRQFFLDCNEIADLCDSAERIFSSEPSVLQLKAPVKIFGDLHGQFGDLMRLFDEYGAPSTAGDIAYIDYLFLGDYVDRGQHSLETMTLLLALKVEYPQNVHLIRGNHEAADINALFGFRIECIERMGERDGIWTWHRMNRLFNWLPLAALIEKKIICMHGGIGRSINHVEQIENLQRPITMEAGSVVLMDLLWSDPTENDSVEGLRPNARGPGLVTFGPDRVMEFCNNNDLQLIVRAHECVMDGFERFAQGHLITLFSATNYCGTANNAGAILVLGRDLVVVPKLIHPLPPAITSPETSPEHHIEDTWMQELNANRPPTPTRGRPQVAANDRGSLAWI

SEQ ID NO: 359 - DNA, 2676 bp, Oryza sativa
  CDS (1)..(2676)
atggggacggcggggaagggggcgtgggtggtgccggcgccggcgtacagggaggtggaagggtgggagggggcgggggacgactcgccggggttcaggtgcggccactcgctgacggtggtcgcgcccaccaaggggcacggcccgcggctcatcctcttcggcggcgccaccgccatcgaggccggcgcatcctcaggcatgccgggcatcaggctcgcgggggtgacgaactcggtgcactcgtatgatgtggacacgcgcaggtggacgagattgcatccagctggagagcctccatcgccgagggctgcacatgctgcagctgccgtaggaacgatggttgttttccagggtggtattggaccagcggggcactcgacagatgatctctatgttcttgacctgacaaacgacaagtttaaatggcacagggttgttgttcagggggctgggcctggtcctcgctatggtcactgtatggatctggtagcccaacgttatcttgtaactgtctctggaaatgatggaaagcgagtcttatcggatgcttgggctctggacacagcacagaaaccatataggtggcagaaacttaaccctgatggcgatagaccttcagcgagaatgtatgctactgccagtgcacgcaccgatggcatgcttttactttgcggtggaagggatgcttctgggatgccactttctgatgcttatggactactaatgcatacaagtggccagtgggagtggacactagctccaggggtatctccatctccaagatatcagcatgcagctgtctttgttggtgctcggttgcatgttactggtggagtccttagaggagggagagccattgagggagagggtgcaatagcagttctggacactgctgctggagtttggttggatagaaatggcattgtgacctctcgcacattgaagtcttcacatgaccatgatgcttcttcggatctacttcgccgttgtcgtcatgcagctgcttctgttggaacgcagatatacatttatggtggtctgaggggagatattctcctcgacgattttcttgttgctgataatgcacctatccaatcagaatttacttcatctatgtacgacagagtcccaagggcagaaaatcaaaatagaaaccacaattttaattcagattctcccactacaaataacaggcacgagatagcttctggtttcagcacggacaagaagtccattgacatgttgacacaggcttcagctgccgaagctgaagctgttagtgctgtatggcgtgctgcacaggaagcatctcatgcatcttcagaagatagcctgtcagagggaataggatctgagtccccactcagtgaaacttcaccgatgcctgaggatttagacgatggaggctccctagaaccagatgtgaagctgcattcaagagcggttgtagtttctaaagaagcagtaggagatttgggatgtttggtccgacagctttcattggaccaatttgagaatgaaagcagaagaatgcatccctcaagcaatgatcaatcatatccagccaagaaagcattaaacagacaaaggtccccacaaggtttgcataagaaggttatttcgttcttacttaagccaaggaattggagggctcccgctgaaagggcttttttccttgattcatacgaagttggcgagctatgttatgctgctgagcagatttttatgcaggagccaactgttttacaattaaaagcaccaattaaagtatttggtgatcttcatgggcagtttggggacctaatgcgcctttttgatgaatatggttatccatcaactgctggtgatataacgtatattgattatctcttcttgggagactatgttgaccgaggtcagcacagcttggaaacaataacattgcttcttgctcttaaaatagagtaccctgaaaacgtccacttgattaggggaaatcacgaggctgctgacatcaatgcactttttgggttccgccttgaatgcatagagagaatgggtgaaagtgatggcatatgggcttggacaagattcaatcaactgtttaattatctcccacttgctgccatgatagaaaagaaaataatttgcatgcatggtggcattggaaggtcaataaacactatcgagcaaatcgagaaacttgaacggcctatcacaatggatgttggatctattattctcatggaccttttatggtccgatcctacagaaaatgatagtgtggagggtttgagaccaaatgcacgagggcctggcttggtgacatttgggcctgatcgagtgactgaattctgtaaacgaaacagattgcaactaatcataagagctcatgagtgtgttatggatgggtttgagcgttttgctcatgggcaattgataactttattttcagccactaactattgtggtactgcaaacaacgctggggccatacttgtggtgggcaggggactagttattgttccaaagttaattcatccacttcctccaccagttaattctccagagtcttccccagaacgtgccatggacgccacatggatgcaggaacttaacatacaacggccacctacaccaactagaggacggccacagtctgctagtgacagaaattctcttgcttatatatga

SEQ ID NO: 360 - protein, 891 aa, Oryza sativa
MGTAGKGAWVVPAPAYREVEGWEGAGDDSPGFRCGHSLTVVAPTKGHGPRLILFGGATAIEAGASSGMPGIRLAGVTNSVHSYDVDTRRWTRLHPAGEPPSPRAAHAAAAVGTMVVFQGGIGPAGHSTDDLYVLDLTNDKFKWHRVVVQGAGPGPRYGHCMDLVAQRYLVTVSGNDGKRVLSDAWALDTAQKPYRWQKLNPDGDRPSARMYATASARTDGMLLLCGGRDASGMPLSDAYGLLMHTSGQWEWTLAPGVSPSPRYQHAAVFVGARLHVTGGVLRGGRAIEGEGAIAVLDTAAGVWLDRNGIVTSRTLKSSHDHDASSDLLRRCRHAAASVGTQIYIYGGLRGDILLDDFLVADNAPIQSEFTSSMYDRVPRAENQNRNHNFNSDSPTTNNRHEIASGFSTDKKSIDMLTQASAAEAEAVSAVWRAAQEASHASSEDSLSEGIGSESPLSETSPMPEDLDDGGSLEPDVKLHSRAVVVSKEAVGDLGCLVRQLSLDQFENESRRMHPSSNDQSYPAKKALNRQRSPQGLHKKVISFLLKPRNWRAPAERAFFLDSYEVGELCYAAEQIFMQEPTVLQLKAPIKVFGDLHGQFGDLMRLFDEYGYPSTAGDITYIDYLFLGDYVDRGQHSLETITLLLALKIEYPENVHLIRGNHEAADINALFGFRLECIERMGESDGIWAWTRFNQLFNYLPLAAMIEKKIICMHGGIGRSINTIEQIEKLERPITMDVGSIILMDLLWSDPTENDSVEGLRPNARGPGLVTFGPDRVTEFCKRNRLQLIIRAHECVMDGFERFAHGQLITLFSATNYCGTANNAGAILVVGRGLVIVPKLIHPLPPPVNSPESSPERAMDATWMQELNIQRPPTPTRGRPQSASDRNSLAYI

SEQ ID NO: 361 - DNA, 3030 bp, Oryza sativa
  CDS (1)..(3030)
atggacgtggactcgaggatgacgacggagtcggactccgactcggacgccgcggcgcaggggggaggaggaggagggttcgggagcgagacctcctcggcgtcgccctcggcgcccgggacgccgacggctatgggggcaggagggggagctgctcctatcgctgctgctgctatcgctgccgccgcgtcggcggcggtggtggcgggcccgaggcccgcgccggggtacacggtggtgaacgcggcgatggagaagaaggaggacgggcccgggtgccggtgcggccacacgctcaccgcggtgccggccgtcggggaggagggcgcgccggggtacgtggggccgcggctgatcctcttcggcggtgccaccgcgctcgaggggaactccgccacgccgccatcctcggccgggagcgccggaatccgtcttgctggtgctactgcggatgtgcactgctacgatgtttcatcgaataagtggagcaggcttactccagttggtgaacctccttcaccaagagcggcacatgtagcgactgctgttggcaccatggtggtcattcagggtgggataggtcctgctggtttatctgcagaagaccttcatgttctggatcttacacaacaacgaccgcgatggcacagagtggtggttcaagggcctggccctggtcctcgatatggacatgtgatggctttggttgggcagcgtttcttgttgacaatcggtggaaatgatgggaagaggcccctggctgatgtgtgggcccttgatacagcagctaagccatatgagtggaggaaacttgaaccagaaggtgaaggaccacccccatgcatgtatgcaactgcaagtgcccgttctgatggacttctattactctgtggtgggagggatgctaatagtgtgcccctagcaagtgcatatggccttgcaaaacacagggatggacgctgggagtgggcaatcgcccctggtgtctctccatcacccagatatcaacatgcagctgttttcgtcaatgcacgacttcatgtctcaggaggggcccttggaggcggtcgcatggttgaagactcctcaagtgttgcagtgttggatactgctgctggagtgtggtgtgatacaaaatcagtagttactactccaaggacaggaagatatagtgcagatgctgcaggcggtgatgcttctgtagagcttacacgacggtgcaggcatgcagctgctgcagttggtgatatgatatatgtttatggaggtctacggggaggtgtgctgctagatgaccttcttgttgccgaagatcttgctgctgctgaaacaacaaatgcagcaaatcaggcagctgcaattgctgcagcctctgacatacaagctggaagagaacctggtaggtatgcctacaatgatgaacaaacagggcagccagctacaataacatctcctgatggagctgtggttcttggaactccagttgctgctcccgttaatggggacatgtatactgatattagccctgagaacgctgtgatccagggacaaaggagaatgagcaaaggtgttgattatttggttgaagcatctgctgcagaggctgaggcaatcagtgctactttagctgctgtaaaagctcggcaagttaatggtgaggcagagcattcacctgacagggagcagtctccagatgccacaccaagtgtgaagcaaaatgcaagcctgataaaaccagactatgctctttcaaataattcaacaccacctcctggggttcggttacaccatagagcagttgtggtagcagcagaaaccggaggtgccttaggtggcatggttaggcagctctcaattgaccagtttgaaaatgaaggaagaagggtcatctatggcactcctgagagtgcaactgcagcaaggaagttgctagatcggcaaatgtctattaatagtgtacctaaaaaggtaattgcatccctcttgaaacctcgtggttggaagccccctgtgcgaaggcagttctttttggactgcaatgagattgcagacctatgtgatagtgcggaaagaatattttcaagtgaaccaagtgtcctacagcttaaagctccaattaagatatttggtgatttgcacggtcaatttggtgacctaatgcgcttgtttgatgagtacggtgctccttcgacagctggagacattgcttacattgattacctcttcttgggagattacgtggatcgtggtcagcatagtttggagacaatcactcttctccttgcacttaaggttgaatatcctcttaatgtacatttgattcgagggaatcatgaggccgctgatatcaatgctttgtttgggttccgaatagagtgcatagagcgaatgggtgagcgtgatgggatctggacctggcatcgcatgaataggctatttaattggcttcctttggctgccctaatagagaagaaaataatatgtatgcatggtggtattggccggtctatcaatcatgttgaacaaattgagaatcttcaaagaccaattaccatggaagcaggctcggttgttctaatggatcttctgtggtctgatccaactgaaaatgatagtgttgaaggacttagaccaaatgcccgtggcccaggccttgttacctttgggccggatcgtgttatggagttctgcaacaacaatgacttacagttaattgtgcgagcacatgagtgtgtgatggatggttttgagcgttttgctcaaggtcacctaatcactctcttctcagcaacaaattactgtggtacggcaaacaatgcgggtgcaatcttggttctaggaagagatcttgtagtagttccgaaactcatccatcctttgccgcctgccattacatctcccgagacctctccagagcatcatcttgaggacacatggatgcaggaactaaatgccaacaggccgccaactccaacaaggggccgccctcaagcagcaaacaatgaccgaggctctcttgcatggatatag

SEQ ID NO: 362 - protein, 1009 aa, Oryza sativa
MDVDSRMTTESDSDSDAAAQGGGGGGFGSETSSASPSAPGTPTAMGAGGGAAPIAAAAIAAAASAAVVAGPRPAPGYTVVNAAMEKKEDGPGCRCGHTLTAVPAVGEEGAPGYVGPRLILFGGATALEGNSATPPSSAGSAGIRLAGATADVHCYDVSSNKWSRLTPVGEPPSPRAAHVATAVGTMVVIQGGIGPAGLSAEDLHVLDLTQQRPRWHRVVVQGPGPGPRYGHVMALVGQRFLLTIGGNDGKRPLADVWALDTAAKPYEWRKLEPEGEGPPPCMYATASARSDGLLLLCGGRDANSVPLASAYGLAKHRDGRWEWAIAPGVSPSPRYQHAAVFVNARLHVSGGALGGGRMVEDSSSVAVLDTAAGVWCDTKSVVTTPRTGRYSADAAGGDASVELTRRCRHAAAAVGDMIYVYGGLRGGVLLDDLLVAEDLAAAETTNAANQAAAIAAASDIQAGREPGRYAYNDEQTGQPATITSPDGAVVLGTPVAAPVNGDMYTDISPENAVIQGQRRMSKGVDYLVEASAAEAEAISATLAAVKARQVNGEAEHSPDREQSPDATPSVKQNASLIKPDYALSNNSTPPPGVRLHHRAVVVAAETGGALGGMVRQLSIDQFENEGRRVIYGTPESATAARKLLDRQMSINSVPKKVIASLLKPRGWKPPVRRQFFLDCNEIADLCDSAERIFSSEPSVLQLKAPIKIFGDLHGQFGDLMRLFDEYGAPSTAGDIAYIDYLFLGDYVDRGQHSLETITLLLALKVEYPLNVHLIRGNHEAADINALFGFRIECIERMGERDGIWTWHRMNRLFNWLPLAALIEKKIICMHGGIGRSINHVEQIENLQRPITMEAGSVVLMDLLWSDPTENDSVEGLRPNARGPGLVTFGPDRVMEFCNNNDLQLIVRAHECVMDGFERFAQGHLITLFSATNYCGTANNAGAILVLGRDLVVVPKLIHPLPPAITSPETSPEHHLEDTWMQELNANRPPTPTRGRPQAANNDRGSLAWI

SEQ ID NO: 363 - DNA, 1854 bp, Arabidopsis thaliana; identical to SEQ ID NO: 171
  CDS (1)..(1854)

SEQ ID NO: 364 - protein, 617 aa, Arabidopsis thaliana; identical to SEQ ID NO: 172

SEQ ID NO: 365 - DNA, 1830 bp, Glycine max
  CDS (1)..(1830)
atggacttcatatttgtgctattgctattgggttgcttatgttcttttgtgttgcctgatacgcaaggagatgcactatttgcattgaagatatcattgaatgcttcagctcaccagcttactgactggaatcaaaatcaagtgaatccttgtacttggtcacgtgtttactgtgactcaaacaacaatgtcatgcaagtatcactagcatatatgggattcacaggatacttgaccccaataataggagttctaaaatatcttacagctctatctttgcaagggaatggaatcactggcaacataccaaaagagttaggaaacctgacaagcttgagcaggttggatttggaaagcaacaaattaactggagaaataccctcctcccttggtaatcttaaaaggcttcaattcttaacattgagccaaaacaatctcagtgggactattcctgaatcacttgccagtcttccaatcttaatcaatgttctgctagattcaaataatctgagtggccaaatcccagagcagttatttaaggttcctaaatacaagtatggatgtttcactggaaataatttgaattgtggtgcgagttatcatcaaccttgtgaaactgataatgcagatcaaggttcatcccataaacctaaaactggcctcatagttggcattgtgatagggttagttgttatccttttccttggtggtctgctgttcttttggtgcaagggtagacacaagagctacagacgtgaagtttttgtagatgttgcaggtgaagttgatcggcgaattgcatttggccaactaagaagatttgcatggagagaactacagatagctacagacaacttcagtgagaaaaatgttttaggacagggaggctttggaaaggtttataaaggtgttcttgctgataacacaaaagttgctgtcaaaaggttaactgattatgaaagtcctgggggtgatgcagctttccagcgtgaggttgagatgataagtgtagccgtgcataggaacctgttacggctgattggattttgtactaccccaaccgagcgcctcttagtttatccctttatgcagaacttaagtgtagcctatcgtcttcgagaactcaaacctggtgaacctgttctagactggcctacaagaaaacgagtggcgctgggaacagcccgtggcttagaatatcttcatgagcattgcaatcctaagattattcatcgggatgtgaaggcagctaatgtattactagatgaagattttgaagctgttgttggtgattttggcttggcaaagttagtcgatgttcgaaaaactaatgtgacaactcaagttcgtggaacaatgggccacatagctccagagtatttgtccactggaaagtcttcagaaagaactgatgtttttggttatgggattatgcttttggagcttgttacaggtcaacgagcaattgacttttcacgtttagaagaggaagatgatgtgctgctacttgaccatgttaagaaattagaacgggagaaaagactagaagcaattgttgaccgcaacctaaataaaaattacaacatacaagaggtagaaatgatgatacaagttgcattactctgtacgcaagcaacaccagaggatcgtccaccaatgtccgaggttgtaagaatgctagaaggagaagggttggctgaaaggtgggaggaatggcagcatgtggaggtcaatcggaggcaagaatacgagagattacaaagaagatttgattggggagaagattcggtctataatcaagatgccattgagttgtctggtgggagatga

SEQ ID NO: 366 - protein, 609 aa, Glycine max
MDFIFVLLLLGCLCSFVLPDTQGDALFALKISLNASAHQLTDWNQNQVNPCTWSRVYCDSNNNVMQVSLAYMGFTGYLTPIIGVLKYLTALSLQGNGITGNIPKELGNLTSLSRLDLESNKLTGEIPSSLGNLKRLQFLTLSQNNLSGTIPESLASLPILINVLLDSNNLSGQIPEQLFKVPKYKYGCFTGNNLNCGASYHQPCETDNADQGSSHKPKTGLIVGIVIGLVVILFLGGLLFFWCKGRHKSYRREVFVDVAGEVDRRIAFGQLRRFAWRELQIATDNFSEKNVLGQGGFGKVYKGVLADNTKVAVKRLTDYESPGGDAAFQREVEMISVAVHRNLLRLIGFCTTPTERLLVYPFMQNLSVAYRLRELKPGEPVLDWPTRKRVALGTARGLEYLHEHCNPKIIHRDVKAANVLLDEDFEAVVGDFGLAKLVDVRKTNVTTQVRGTMGHIAPEYLSTGKSSERTDVFGYGIMLLELVTGQRAIDFSRLEEEDDVLLLDHVKKLEREKRLEAIVDRNLNKNYNIQEVEMMIQVALLCTQATPEDRPPMSEVVRMLEGEGLAERWEEWQHVEVNRRQEYERLQRRFDWGEDSVYNQDAIELSGGR

SEQ ID NO: 367 - DNA, 1842 bp, Glycine max
  CDS (1)..(1842)
atgccagtagaaatggacttcatatttgtgctattgctattgggttgcttatgttcttttgtgttgcctgatacacaaggagatgcactatttgcattgaagatatcattaaatgcttcagctcaccagcttactgactggaatcaaaatcaagtgaatccttgtacttggtcacgtgtttactgtgactcaaacaacaatgtcatgcaagtatcactagcatatatgggattcacaggatacttgaacccaaggataggagttctaaaatatcttacagctctttctttgcaagggaatggcatcactggcaacataccaaaagagttaggaaacctgacaagcttgagcaggttagatttggaaggcaacaaattaactggagaaataccctcttcccttggtaatcttaaaaagcttcaattcttaacattaagtcaaaacaatctcagtgggactattcctgaatcacttgccagtcttccaatcttaatcaatgttctgctagattcaaataatctgagtggccaaatcccagagcagttattcaaggttcctaaatacaagtatggatgtttcactggaaataatttgagttgtggtgcgagttatcatcaaccttgcgaaactgataatgcagatcaaggttcatcacataaaccaaaaactggtctcattgttggaattgtgatagggttagttgttatccttttccttggtggtctgatgttctttgggtgcaagggtagacacaagggctacagacgtgaagtttttgtagacgtcgcaggtgaagttgatcggcgaattgcatttggccaactaagaagatttgcatggagagaactacagatagctacagacaacttcagtgagaaaaatgttttaggacagggaggctttggaaaggtttataaaggtgttcttgctgataacacaaaagttgctgtcaaaaggttaactgattatgaaagtcctgggggagatgcagctttccagcgtgaggttgagatgataagtgtagctgtgcataggaacctgttacggctgattgggttttgtactaccccaaccgagcgcctcttagtttatccctttatgcagaacttaagtgtagcctatcgtcttcgagaaatcaaacctggtgaacctgttctggactggcctacaagaaaacaggtggctctgggaacagcccgtggcttagaatatctccatgagcattgcaatcctaagattattcatcgggatgttaaggcagctaatgtattactagatgaagattttgaagctgttgttggtgattttggcttggcaaagttagtcgatgttcgaaaaactaacgtgacaactcaagttcgtgggacaatgggccacatagctccagagtatttgtccactggaaagtcttcggaaaggactgatgtttttggttatgggattatgcttttggagcttgttacaggtcaaagagcaattgacttttcacgtttagaagaggaagatgatgtgctgttacttgaccatgttaagaaattagaaagggagaaaagactagatgcaattgttgaccacaacctaaataaaaattacaacatacaagaggtagaaatgatgataaaagttgcattactctgtacgcaagcaacaccagaggaccgtccaccaatgtccgaggttgtaagaatgctagaaggagaagggttagctgaaaggtgggaggaatggcagcatgtggaggtaaatcggaggcaagaatatgagagattacaaagaagatttgattggggagaagattcggtctataatcaagatgccattgagttgtctggcgggagatga

SEQ ID NO: 368 - protein, 613 aa, Glycine max
MPVEMDFIFVLLLLGCLCSFVLPDTQGDALFALKISLNASAHQLTDWNQNQVNPCTWSRVYCDSNNNVMQVSLAYMGFTGYLNPRIGVLKYLTALSLQGNGITGNIPKELGNLTSLSRLDLEGNKLTGEIPSSLGNLKKLQFLTLSQNNLSGTIPESLASLPILINVLLDSNNLSGQIPEQLFKVPKYKYGCFTGNNLSCGASYHQPCETDNADQGSSHKPKTGLIVGIVIGLVVILFLGGLMFFGCKGRHKGYRREVFVDVAGEVDRRIAFGQLRRFAWRELQIATDNFSEKNVLGQGGFGKVYKGVLADNTKVAVKRLTDYESPGGDAAFQREVEMISVAVHRNLLRLIGFCTTPTERLLVYPFMQNLSVAYRLREIKPGEPVLDWPTRKQVALGTARGLEYLHEHCNPKIIHRDVKAANVLLDEDFEAVVGDFGLAKLVDVRKTNVTTQVRGTMGHIAPEYLSTGKSSERTDVFGYGIMLLELVTGQRAIDFSRLEEEDDVLLLDHVKKLEREKRLDAIVDHNLNKNYNIQEVEMMIKVALLCTQATPEDRPPMSEVVRMLEGEGLAERWEEWQHVEVNRRQEYERLQRRFDWGEDSVYNQDAIELSGGR

SEQ ID NO: 369 - DNA, 1794 bp, Glycine max
  CDS (1)..(1794)
atggagagagtgacttcatcttttatgggttccttttttttttgggcaattttggtgcttgatttggtacttaaggcttctggcaatcaggaaggtgatgccctgaatgcattgaagagcaacttgcaagatcctaacaacgttcttcaaagctgggatgctacccttgtcaatccctgcacgtggtttcatgttacatgcaacagtgataacagtgtgacccgtgttgatcttggaaatgcagatctttctggtcaactggtttcacaacttggtcaacttacaaatttgcagtacttggaactttatagtaataagataactggaaaaattccagatgagcttgggaacttaacaaatttggtgagcttggatctttacttgaacactttaaatggtcccataccgactactttgggcaaacttgcaaaactacgtttcctgcgtctcaataataatagcttgacaggaggcatacccatatctttgacaaatgtttcttcactgcaagttcttgatctctcaaataaccatctaaaaggggaaatcccagtgaatggttcattttcattatttacccccatcagtttctccaacaccaccaccagcttcttcagtaatactggagctattgctggaggagttgctgctggtgctgctctgttgtttgcagcccctgcaattgcacttgcttattggcgaagaaggaaacctcaggatcatttctttgatgttcctgctgaggaggatcctgaagttcaccttggtcagcttaaaaggttttctctgcgtgagttgcaagttgcaacagataactttagtaacaaacacattctgggtagaggtggatttggaaaggtttataaaggacgcttagctgacggatctcttgtagcagtaaaaagacttaaagaggaacgcacgcagggtggagagctgcaatttcaaactgaagtggaaatgatcagcatggctgtgcatcgtaatttgcttcggcttcgtggtttttgtatgacacctactgagcggttgcttgtgtatccttacatggctaacggaagtgtagcatcatgtttacgagaacgtcaagaatcccaaccgccacttggctggccagaacggaagcgtattgcactgggatctgcaagggggcttgcttatttgcatgatcattgtgaccctaagattattcaccgtgatgtcaaagcagcaaatatattgttggacgaggaatttgaagcagttgttggagattttggtttagctaaacttatggattataaagatactcatgtcactactgctgtacgtggaacaattggacatatagcaccagagtacctctcaactggaaagtcttcagagaagactgatgtttttggatatggtgtgatgcttcttgaactaataactggacaaagggcttttgatctagctcgacttgccaatgatgatgatgtcatgttgctcgattgggttaaaggacttctcaaagacaggaaattggaaacactggtagatgcagatttacagggcagctataatgatgaggaggtagagcagttaatccaagtggccttactatgcacacaaggctctcctatggaaagacctaagatgtctgaggtggtcagaatgctagaaggtgatggtttggctgagaaatgggagcaatggcagaaagacgaaacattccggcaagacttcaataacaacatacatcaccctaatgcaaattggatagtagattcaacttcccatatccaggcagatgaactatcaggtcctagatga

SEQ ID NO: 370 - protein, 597 aa, Glycine max
MERVTSSFMGSFFFWAILVLDLVLKASGNQEGDALNALKSNLQDPNNVLQSWDATLVNPCTWFHVTCNSDNSVTRVDLGNADLSGQLVSQLGQLTNLQYLELYSNKITGKIPDELGNLTNLVSLDLYLNTLNGPIPTTLGKLAKLRFLRLNNNSLTGGIPISLTNVSSLQVLDLSNNHLKGEIPVNGSFSLFTPISFSNTTTSFFSNTGAIAGGVAAGAALLFAAPAIALAYWRRRKPQDHFFDVPAEEDPEVHLGQLKRFSLRELQVATDNFSNKHILGRGGFGKVYKGRLADGSLVAVKRLKEERTQGGELQFQTEVEMISMAVHRNLLRLRGFCMTPTERLLVYPYMANGSVASCLRERQESQPPLGWPERKRIALGSARGLAYLHDHCDPKIIHRDVKAANILLDEEFEAVVGDFGLAKLMDYKDTHVTTAVRGTIGHIAPEYLSTGKSSEKTDVFGYGVMLLELITGQRAFDLARLANDDDVMLLDWVKGLLKDRKLETLVDADLQGSYNDEEVEQLIQVALLCTQGSPMERPKMSEVVRMLEGDGLAEKWEQWQKDETFRQDFNNNIHHPNANWIVDSTSHIQADELSGPR

SEQ ID NO: 371 - DNA, 1764 bp, Glycine max
  CDS (1)..(1764)
atgtttatgttcatttcagaagatgcattgtatgctttgaaggtatcattgaatgtttctgccaaccagcttacaaactggaataaaaatctagtaaacccttgtacttggtccaatgttgaatgtgaccagaatagcaacgttgttcgaatttcactagaatttatgggattcacaggatcgttgacacctagaattggatctctaaaaagtcttacaattctttctttgcaagggaataacattactggtgacataccaaaagaatttggaaatcttacaaacttggtcagattggatttggaaagcaacaaattaactggtgaaataccatattcacttggtaatcttaaaaggcttcaattcttgacattgagtcaaaacaatctctatgggactattccagaatcacttgccagtctcccaagcttgatcaatgttatgctagattcaaatgatcttagcgggcagattccagagcagttattcagcattcctatgtacaatttcactggaaataatttgaattgtggtgtgaattaccatcatctttgcacatctgataatgcatatcaagattcgtcacataaaacaaaaataggcctcatagctgggacagttacaggtttagttgttattctttttcttggtggcctgctgttcttctggtacaaggggtgcaagcgtgaagtttatgtagatgttccaggtgaagtcgatcgccgaattacatttggtcaaataaaaagattttcctggaaagaactgcagatagctacagacaacttcagcgagaaaaatattttaggacagggaggttttggaaaggtttataaaggtattctagcagatggcaccaaagttgctgtcaaaaggttaactgattatgaaagtcctgcgggtgatgcagctttccagcgtgaagtggagttgataagcatagctgtccataggaatctgttacggctcattggtttttgtactacttcaactgaacgcctcttagtttatcccttcatgcagaacttaagtgttgcctatcgtttacgagaactcaaacgtggggaacccgttttagattggcctaccagaaaacgagtggctctaggaactgcccgtggcctagaatatcttcacgagcaatgcaatcctaggattattcatagggatgtgaaggcagctaatatattacttgatggagattttgaagcagttgtcggtgactttggtttggcaaaattagttgatattcgacatactaatgtgacaactcaagttcgtgggacaatgggtcatatagctccagaatacttgtccactggaaaatcttcagaaaggacagatgtttttggttatgggattatgcttatggagcttgtaacaggtcagcgtgcaattgacttttcacgtctggaagaggaagatgacgtcttattgcttgaccatgttaagaaactgcagcgggagaaaagactagagactattgttgattgcaaccttaataaaaattacaacatagaagatgttgaagtaattgtacaaattgcattactctgcacacaagcatcacccgaggatcgtccagcaatgtcagaggttgtaagaatgttagagggagaagggctagctgaaagatgggaggaatggcagcatgtggaggtcaatacaaggcaagattatgagagactgcaaagaagaatgaactggggagaagattcggtttataataaccaagatgcagttgagttatcgggtggaagatga

SEQ ID NO: 372 - protein, 587 aa, Glycine max
MFMFISEDALYALKVSLNVSANQLTNWNKNLVNPCTWSNVECDQNSNVVRISLEFMGFTGSLTPRIGSLKSLTILSLQGNNITGDIPKEFGNLTNLVRLDLESNKLTGEIPYSLGNLKRLQFLTLSQNNLYGTIPESLASLPSLINVMLDSNDLSGQIPEQLFSIPMYNFTGNNLNCGVNYHHLCTSDNAYQDSSHKTKIGLIAGTVTGLVVILFLGGLLFFWYKGCKREVYVDVPGEVDRRITFGQIKRFSWKELQIATDNFSEKNILGQGGFGKVYKGILADGTKVAVKRLTDYESPAGDAAFQREVELISIAVHRNLLRLIGFCTTSTERLLVYPFMQNLSVAYRLRELKRGEPVLDWPTRKRVALGTARGLEYLHEQCNPRIIHRDVKAANILLDGDFEAVVGDFGLAKLVDIRHTNVTTQVRGTMGHIAPEYLSTGKSSERTDVFGYGIMLMELVTGQRAIDFSRLEEEDDVLLLDHVKKLQREKRLETIVDCNLNKNYNIEDVEVIVQIALLCTQASPEDRPAMSEVVRMLEGEGLAERWEEWQHVEVNTRQDYERLQRRMNWGEDSVYNNQDAVELSGGR

SEQ ID NO: 373 - DNA, 1818 bp, Glycine max
  CDS (1)..(1818)
atggatttggcatctgttcttttgctattaactagcttatgctcttcttctgcactggctgagcttgattcacaagaagatgcactgtatgcattgaaggtatcattgaatgcttctcccaaccagcttacaaactggaacaaaaatctagtaaacccttgtacttggtccaatgttgaatgtgaccagaatagcaacgttgttcgaatttcactagaatttatgggattcacaggatcattgacaccaagaataggatctctaaatagtcttacaattctttctttgcaagggaataacatcactggtgacataccaaaagaatttggaaatcttacaagcttggtcagattggatttggaaaacaacaaattaactggtgaaataccatattcacttggtaatcttaaaaagcttcaattcttgacattgagtcaaaacaatctcaatgggactattccagaatcacttgccagtctcccaagcttgatcaatgttatgctagattcaaatgatctcagcgggcagattcctgagcagttattcagcattcctacgtacaatttcactggaaataatttgaactgtggtgtgaattatcttcatctttgcacatctgataatgcatatcaaggttcgtcacataaaacaaaaataggcctcatagttggaacagttacaggtttagttgttattctttttcttggtggcctgctgttcttctggtacaaggggtgcaagagtgaagtttatgtagatgttccaggtgaagtcgatcgccgaattacatttggtcaaataaaaagattttcctggaaagaactacagatagctacagacaacttcagtgagaaaaatattttaggacagggaggttttggaaaggtttataaaggtattctagctgatggcaccaaagttgctgtcaaaaggttaaccgattatgaaagtcctgcgggtgatgcagctttccagcgtgaagtggagttgataagcatagctgtccataggaacctgttacggctcattggtttttgtactacttcaactgaacgcctcttagtttatcccttcatgcagaacttaagtgttgcctatcgtctacgagaactcaaacgtggggaagccgttttagattggcctaccagaaaacgagtggctctaggaacagcccgtggcctagaatatcttcacgagcaatgcaatcctaggattattcatagggatgtgaaggcagctaatatattacttgatggagattttgaagcagttgttggtgactttggtttagcaaaattagttgatattcgacatactaatgtgacaactcaagttcgtgggacaatgggtcatatagctccagaatacttgtccactggaaaatcttcagaaaggacagatgtttttggttatgggattatgcttttggagctcgtaacaggtcaacgtgcaattgacttttcacgtttggaagaggaagatgacgtgttattgcttgaccatgttaagaaactgcaacgggagaaaagactagagactattgttgactgcaaccttaataaaaattacaacatggaagaggttgaaatgattgtacaaattgcattactctgcacacaagcatcgcctgaggatcgtccagcaatgtcagaggttgtaagaatgttagagggagaagggctagctgaaagatgggaggaatggcagcatgtggaggtcaatacaaggcaagattatgagagactgcaaagaagaatgaactggggagaagattcggtttataaccaagatgcagttgagttatcgggtggaagatga

SEQ ID NO: 374 - protein, 605 aa, Glycine max
MDLASVLLLLTSLCSSSALAELDSQEDALYALKVSLNASPNQLTNWNKNLVNPCTWSNVECDQNSNVVRISLEFMGFTGSLTPRIGSLNSLTILSLQGNNITGDIPKEFGNLTSLVRLDLENNKLTGEIPYSLGNLKKLQFLTLSQNNLNGTIPESLASLPSLINVMLDSNDLSGQIPEQLFSIPTYNFTGNNLNCGVNYLHLCTSDNAYQGSSHKTKIGLIVGTVTGLVVILFLGGLLFFWYKGCKSEVYVDVPGEVDRRITFGQIKRFSWKELQIATDNFSEKNILGQGGFGKVYKGILADGTKVAVKRLTDYESPAGDAAFQREVELISIAVHRNLLRLIGFCTTSTERLLVYPFMQNLSVAYRLRELKRGEAVLDWPTRKRVALGTARGLEYLHEQCNPRIIHRDVKAANILLDGDFEAVVGDFGLAKLVDIRHTNVTTQVRGTMGHIAPEYLSTGKSSERTDVFGYGIMLLELVTGQRAIDFSRLEEEDDVLLLDHVKKLQREKRLETIVDCNLNKNYNMEEVEMIVQIALLCTQASPEDRPAMSEVVRMLEGEGLAERWEEWQHVEVNTRQDYERLQRRMNWGEDSVYNQDAVELSGGR

SEQ ID NO: 375 - DNA, 1779 bp, Glycine max
  CDS (1)..(1779)
atggatagagtgacttcgtcttttatgggttccttttttgtttgggcaattttggtgcttgatttggtacttaaggcttctggcaatcaggaaggcgatgccctgaatgcattaaagagcaacttgcaagatcctaacaatgttcttcaaagctgggatgctacccttgtcaatccctgcacgtggtttcatgttacatgcaacagtgataacagtgtgacccgtgttgatcttggaaatgcagatctttctggtcaactggttccagaacttggtcaacttacaaatttacagtacttggaactttatagcaataatataactggaaaaattccagaagagcttgggaacttaacaaatttggtgagcttggatctttacttgaacactttggatggtcccataccgactactttgggcaaccttgcaaaactacgtttccttgatctctcaaataacaagctaaaaggggaagtcccagtgaatggttcattttctttatttacccccatcagttatcaaaacaatcctgacttgatacaaccaaaaaacactccatctcctgtttctccaacaccaccagcagcttcttcaggtaacagtaatactggagctattgctggaggagttgctgctggtgctgctctgttgtttgcagcccctgcaattgcacttgcttattggcgaagaaggaaacctcaggatcatttctttgatgttcctgctgaggaggatcctgaagttcaccttggtcagcttaaaaggttttctttgcgtgagctgcaagttgcaacagataactttagtaacaaacacattctgggtagaggtggatttggaaaggtttataaaggacgcttagctgatggatctcttgtagcagtaaaaagacttaaagaggaacgcacgcagggtggggagctgcagtttcaaaccgaagtggaaatgatcagcatggctgtacatcgtaatttgcttcggcttcgtggtttttgtatgacacctactgaacggttgcttgtgtatccttacatggctaacggaagtgtagcatcatgtttacgagaacgtcaagaatcccaaccgccacttggctggccagaacggaagcgtattgcattgggatctgcaagggggcttgcttatttgcatgatcattgtgaccctaagattattcaccgtgatgtcaaagcagctaatatattgttggacgaggaatttgaagcagttgttggagattttggtttagctaaacttatggattataaagatactcatgttactactgctgtacgtggaacaattggacatatagcaccagaatacctctcaactggaaagtcttcagagaagactgatgtttttggatatggtgtgatgcttcttgaactaataactggacaaagggcttttgatctagctcgacttgccaatgatgatgatgtcatgttgcttgattgggttaaaggacttctcaaagacaggaaattggaaacactagtagatgcagatttacatggtaactacaatgatgaggaggtagagcagttaatccaagtggccttactatgcacacaaggatctcctgtggaaagacctaagatgtctgaggtggtaagaatgctagaaggtgatggtttggctgagaaatgggagcaatggcagaaagacgagacgttccggcaagactttaacagcaacatacatcaccctaatgcaaattggatagtagattcaacttcccatattcaggcagatgaactatcaggtcctagatga

SEQ ID NO: 376 - protein, 592 aa, Glycine max
MDRVTSSFMGSFFVWAILVLDLVLKASGNQEGDALNALKSNLQDPNNVLQSWDATLVNPCTWFHVTCNSDNSVTRVDLGNADLSGQLVPELGQLTNLQYLELYSNNITGKIPEELGNLTNLVSLDLYLNTLDGPIPTTLGNLAKLRFLDLSNNKLKGEVPVNGSFSLFTPISYQNNPDLIQPKNTPSPVSPTPPAASSGNSNTGAIAGGVAAGAALLFAAPAIALAYWRRRKPQDHFFDVPAEEDPEVHLGQLKRFSLRELQVATDNFSNKHILGRGGFGKVYKGRLADGSLVAVKRLKEERTQGGELQFQTEVEMISMAVHRNLLRLRGFCMTPTERLLVYPYMANGSVASCLRERQESQPPLGWPERKRIALGSARGLAYLHDHCDPKIIHRDVKAANILLDEEFEAVVGDFGLAKLMDYKDTHVTTAVRGTIGHIAPEYLSTGKSSEKTDVFGYGVMLLELITGQRAFDLARLANDDDVMLLDWVKGLLKDRKLETLVDADLHGNYNDEEVEQLIQVALLCTQGSPVERPKMSEVVRMLEGDGLAEKWEQWQKDETFRQDFNSNIHHPNANWIVDSTSHIQADELSGPR

SEQ ID NO: 377 - DNA, 1785 bp, Oryza sativa
  CDS (1)..(1785)
atgatcagttcgtgtactttttttcgccgggcaagtgatgcactatatgatatgaagctgaagctgaatgctactggtaaccagctttctgactggaaccaaaatcaagttaacccatgcacttggaattctgttatttgtgacaacaactacaatgttgtgcaagtaacattggcatctatgggattcactggagttctatcaccacgaattggagagcttcagtttttgaatgttttgtccttgcctggtaataagattactggtggcatacctgagcagatcggcaacctatctagtttgacaagtttggatttggaagacaatttgttggttggaccaataccggcttctcttggccagctttcaaagctccaaattctgatactaagtcaaaacaatctcaacggaactatacctgatactgtagcaagaatctcaagcttgacagacattaggttagcctacaataaactctctggttcaatacctggttcgctgtttcaagttgcacgttacaacttttctggtaataacttgacttgtggagcaaactttctgcatccatgctcatcaagtatttcttatcaaggttcatcccatggctcaaaggtaggcattgtactcggaacagttgtaggagcaatagggatacttataataggggctgtgtttattgtctgtaatggaaggaggaaaagccatctacgagaagtttttgtcgatgtatcaggcgaggacgatcgaagaattgcatttggtcagttgaaaagatttgcctggcgagaattacaacttgcaaccgatagtttcagtgagaaaaatgtccttggacaggggggtttcggtaaagtgtataaaggagcacttccagatggcactaagattgctgtaaagcggttgacagattatgaaagccctggtggggaggctgcattcttgcgtgaagtagagcttatcagtgttgcagttcaccggaatcttttaagattgattggcttctgtacaacacaaacagaacgtctacttgtttatcctttcatgcagaatcttagtgtggcctatcgtttacgagaattcaaacctggcgaaccaatattggattggtcagcaaggaaacgtgtggcaataggcacagcacgtggactggagtacctgcacgagcactgtaatcccaagatcatacatcgagatgtcaaggctgccaacgtcctgcttgatgaggattttgagccagttgttggtgactttggcctggcaaagttggttgatgtacagaagacatcagtgacaactcaagtccgtggaactatgggtcacattgcgcctgaatatctgtccacagggaagtcatcggagagaactgatgtttttggttatggcataatgcttcttgagctggtcactggacaacgcgccatcgacttctcacggttggaggaagaagacgatgtgctactgcttgaccatgtgaagaagctgcagagggaagggcagctgggcgccatcgtggaccggaacctgagcagcaactacgacgggcaggaggtggagatgatgatacagatcgcgctgctgtgcacacaggcgtcgccggaggaccggccgtccatgtcggaggtggtgcggatgctggaaggggaaggactcgcggagcggtgggaggagtggcagcaggtggaggtgacgcggcggcaggactacgagcggatgcagcagcgcttcgactggggcgaggactccatcttcaaccaggaagccatcgagctctccgccggcagatga

SEQ ID NO: 378 - protein, 594 aa, Oryza sativa
MISSCTFFRRASDALYDMKLKLNATGNQLSDWNQNQVNPCTWNSVICDNNYNVVQVTLASMGFTGVLSPRIGELQFLNVLSLPGNKITGGIPEQIGNLSSLTSLDLEDNLLVGPIPASLGQLSKLQILILSQNNLNGTIPDTVARISSLTDIRLAYNKLSGSIPGSLFQVARYNFSGNNLTCGANFLHPCSSSISYQGSSHGSKVGIVLGTVVGAIGILIIGAVFIVCNGRRKSHLREVFVDVSGEDDRRIAFGQLKRFAWRELQLATDSFSEKNVLGQGGFGKVYKGALPDGTKIAVKRLTDYESPGGEAAFLREVELISVAVHRNLLRLIGFCTTQTERLLVYPFMQNLSVAYRLREFKPGEPILDWSARKRVAIGTARGLEYLHEHCNPKIIHRDVKAANVLLDEDFEPVVGDFGLAKLVDVQKTSVTTQVRGTMGHIAPEYLSTGKSSERTDVFGYGIMLLELVTGQRAIDFSRLEEEDDVLLLDHVKKLQREGQLGAIVDRNLSSNYDGQEVEMMIQIALLCTQASPEDRPSMSEVVRMLEGEGLAERWEEWQQVEVTRRQDYERMQQRFDWGEDSIFNQEAIELSAGR

SEQ ID NO: 379 - DNA, 1827 bp, Oryza sativa
  CDS (1)..(1827)
atgaaactaatagcttttgggctgttattactggggtatatacaatattttgctacacctgattccgaagtcatagcattgtatgaaataaggacaatgctcaatgacagtcgcggcgtactgaatggctggaataataatcaagttagtccctgctattttccttccatcagttgtaatcaagatcaaaaggtcatttcaataactttgagctcatcaggattatctggattcttgtcacccagcattggaaagctactatatttacaacagctattattgaatgataacaacataaccggaggaattccacaagagttagggaacctatcaagcttaacaacactaaaacttggaggaaatagcttaaatggttcaatacctgactctcttggccgtctttcaaaactccaaaatctggacatgagcaaaaatctcttaatcgggaatattccaacttctttgtctaatctctcatcattgaatgatatcaatctagcagacaacaatctgagcggtgaaatacccaaacggttgcttcaggtgtctcactacagttatataggtaaccatttgaattgtggccaacacttgatttcttgtgaaggaaacaatataaatacaggtggatcaaataactccaaactcaaggtggttgcaagcattggtggagcagtaactctccttgttatcatagtactatttctgttatggtggcaaagaatgcgccaccgacctgaaatatacgttgatgttccaggtcaacatgatcacaatctagagtttggacagataaagcggttctcattgcgagaactccaaattgcaaccaacaatttcagcgagcaaaatgttcttggcaagggtggttttggtaaggtgtacaaaggagtgctttcaggtccacatggcagaaaggttgcagttaaaagactgtttgaagtggaaaaacctgaaggggaaatagctttcctgagagaagttgaattgataagcattgctgtgcacaagaacatattaagattgataggattctgcacgactacaaaagagcgactcttggtctacccttacatggagaatcttagtgttgcttcccgtttgagagatatcaaactaaatgaaccagcattagattggccaacaagagtgcgaattgcccttggcgctgcccgtggcttggaataccttcatgagcactgcaaccccaagattatccaccgcgatgtcaaggcagccaatgtcctgcttgatggaaactttgaagcagtggtaggagactttgggttggcgaagatgatagacagagagaggaatacagttacgaccggggttcgcgggacaatgggccatatagctcctgagtacctgaagacaggaaggccatcagtgaagacagacatatttggatatggtgtaatgttgttagaaatagtgacaggagagcgtgcagtgttccctgaattctcggaaggagacagtgagatcatgctcaatgatcaagtgaaaaggttggtgcaaggaggacgattgacagacattgtggaccacaacctggacactgcatacgatttgcaacagctggagaagatgatccaaatagcactcctctgcactcatgtggagcctcatcttcgccctgctatgtcagaggttgtgcagatgctggaaggcaatgttgtcccagcggagcaatgggaggagtggcaggtggctgaacttgcccggcggcatcagcatgagatgaaccaacagcgcaggctgttcagcttcagtgaggagtctctcaatatccaggaagccattcagctatccagtggcagataa

SEQ ID NO: 380 - protein, 608 aa, Oryza sativa
MKLIAFGLLLLGYIQYFATPDSEVIALYEIRTMLNDSRGVLNGWNNNQVSPCYFPSISCNQDQKVISITLSSSGLSGFLSPSIGKLLYLQQLLLNDNNITGGIPQELGNLSSLTTLKLGGNSLNGSIPDSLGRLSKLQNLDMSKNLLIGNIPTSLSNLSSLNDINLADNNLSGEIPKRLLQVSHYSYIGNHLNCGQHLISCEGNNINTGGSNNSKLKVVASIGGAVTLLVIIVLFLLWWQRMRHRPEIYVDVPGQHDHNLEFGQIKRFSLRELQIATNNFSEQNVLGKGGFGKVYKGVLSGPHGRKVAVKRLFEVEKPEGEIAFLREVELISIAVHKNILRLIGFCTTTKERLLVYPYMENLSVASRLRDIKLNEPALDWPTRVRIALGAARGLEYLHEHCNPKIIHRDVKAANVLLDGNFEAVVGDFGLAKMIDRERNTVTTGVRGTMGHIAPEYLKTGRPSVKTDIFGYGVMLLEIVTGERAVFPEFSEGDSEIMLNDQVKRLVQGGRLTDIVDHNLDTAYDLQQLEKMIQIALLCTHVEPHLRPAMSEVVQMLEGNVVPAEQWEEWQVAELARRHQHEMNQQRRLFSFSEESLNIQEAIQLSSGR
